United States Patent Application Publication US 2025/0051766 A1 - sequence listing, part 28

SEQ ID NO: 5065 - DNA, 58617616 bp, Homo sapiens (residues 56,446,599-58,617,616 of 58,617,616)
  source 1..58617616: mol_type = genomic DNA
aaacacatcttgctccaagggttctagagaaagctttgtggacctgcagttgcttaataactggtagtagctaccattataattattattagtagaagttccagaaaacaaccagacaaaataaggaattaacacaggaagataatggaaatgtttatagtgaagctagcagcatcagcaaaacaagaaacccaagattcctcctatagtccttcccaccccacatcccattaagtcacatcagttaagctgcttctccctctcacattttcctaaaactcttagcttcccttccttttcctttgtaccttcctttgttccttcctgtgtggaatactaacatatcccctcagcccatctccccatcttcaatgtggaaatccttaaaccacaccagacaccaaaattaatcccaggtaaattagttcaatataaagtacaaaatcattacaaactaaaataatatgaaatctaccccaaattctttctaactatggaaataaaaagaaaaattataatgtgaatgccaatacttccaatcacacaaaaatgaaaaaaactttcatataaccaagtagaaaaataagaggtaaataaaataaaaagacttaggaaagaatggggaaatatttgaagtcaaatgtaatgtcatatggttaatgtattttctatatgaaagcttactatacaagcagaaaataaaaaagtcactgctagataaaaggggaaagatcacgaaaaaacaattcacgagaataagtaaaaacagaaaacaaatgctagtaaatctacaagaaagatttatggcctatccagtatgggtaaaccaatatggatatccagtctatccacaagggctcaagaaacaaactggtacttgggaggctgaggcaggaggactgcttgagcccaggagtttaaggttgcagtgagccatgactgcaccactacactccagcctgggtaacagaagaccctgtccctgtctccttaaaaaaaaacaaacaaacatggtgactcacacctttaatcctagcactttgggaggccgaggtgggtggatcacaaggtcaggagttcaagactatcctgaccaacatggtgaaaccccatctctactaaaaacacaaaaattagctgggtatggtgatgtgtgcctgtaatcccggctactcaggaggctggggcaggagaattgcatgaacccaggaggcggaggttgcagtgagctgagatggtgccactgcactccagcctaggtgacagagggagactctatctcaaaaaacaaacaaaacaactaaaaaggagaaagtggaagagccagatggccaaatagagccctccagcgattgccccctctgcagtaacgccaaattgaacaactatccacataagaaaacaccttcataggaaccaaaaattaggtgagcaatcaaagtatcaagttttaacatcgtattcaaagaaagaggcactgaggagggtagaaaagacagtcatcatatgcctgcaccacccctcccccaatgcctggcagtgcagcatggcaacaagagagaatctatgtgtttggaggaggaagaatggagtgatggtgggactctgcattggaactcagtgctgccctgtcacagcagaaagcaacgtggggcagaatttggccagcacccccagaggaagcatttaaatcagctctagcctaagaattgtccaccacagtggtggaaacttgagttccagcaagtacccccaccacagactaaaacactctggtgtcctaagtaaatctgaaaggcagtctaggccacaaggactgcaattcctgggcaaatcctagtgctgtgcttggctcagaaccagtggacttggggtacctgctacccagtgacataccagtgacacaccagctggagtggccaagagagtgtttgtatcaactctctcccaactccaggcagcacagctggcagctccaaggggagagggaagagtaaagaggacgttgtcttgcaacttggatatcatctcaaccacagtaaaaaaaaaaaagtgccaagcagtgtcctgaaggcctcattctaggccataggtcctggacaagatttctagacctaccctgggccagaaggcaactcgctgccctaaagggaaaaacaggcctggaagaatttaccacctgatgaattaagacctcttgggcttcgaataaacatcagtggtagccaggcagtggtagccacaggccttgggcaagaatgagtactacgctggcttcgggtcagacccagcacagtcccagtgttggtggccatgggagtgtttgtatcatcccttccccaactctaggcagctcagcacagagacagagagactccattcattcagggaaagtaagggaaaagaatgacttcctggtaatctagggaattctcctggatcttaccaaagaccaccaaggcagtacttctgtgagtctacaagagtcacagagttactggccatggggtgacccctaatgcaaacatggctgcagtgaacaaagacacatcctagcccctttgaatacatggagagtcttctctggaaggactagtacaaacaagcccagactacaaagataagaataaatacctaattcatcaatgaccaggtactgacaaacatccataagcatcaagaccatccgggaaaacatgacctcaccaaatgaactaaataaggcaacagtgaccagttctggagtgacagagctaatgtgaccgttcagtcagagaattcaaaatagctatcttggcctggcatggtggagcatgcctgtaatcccagcactttgggaggccaaggcgggcgggtggatcacctgagttcaggagttcgagaccagcctgaccaacatggtgaaaccccgtctctactaaaaataaaaaaaaattagctgggcatagtgggacacacctgtaatcccagccgctcgggaggctgaggcacgagaattgcttgaacccaggaggcggaggttgcagtgagccgagatcatgccatcattgtagtccagcctggggaacagagagaaactctgtctcaaaaaaaaaaaaaaaaaagctattttgaggaagctcaacaaaatccaagataacacagagcaggaattcagaatcctatcagataaattttaaaaagacattgaaataattaaagagaatcaagcagaaattctggagctgaaaaattcagttgacaaattaaagaatgcatcagagtctctcaacagcagaattgatcaagcagaagaaatagtgagcttgaagatgggctctttgaaaatatagtcagaggagtcaaagggaagaagaataataaagcatgcctacaggatctagtatatagacccaaaagggcatatctaggagttagtggcttaaagagaaggcagagagactggggtagaaagtgtattccgagatagtaacagagaactttccaaacctggagaaagatgtcaaaattcaagtacaaggaggttatagaacaccaagcagctttaatccaaagaaggctacctcagataatttaataaactcccaaatgtcagggataaagacatgatcctaaaagcagcaagagaaaagaaacaacataaaacggaactctaatacatctggcagcagattgctcagtggaaaccttataggccaggagagagaattatgatatatttaaagagctgaagaaaacaaaaacatttatcctggaatattatatccagtgaaaatgcccttcaaacaggaaggagaaataaagactttcctagacaaacaaaagctgagagattttgtcaacaccagacctctcctacaagaaagcctatagggagttcatcagtctgaaagaaaaggatgctaatgacgaataaaaagtcatctgaacatacaacactcactagcaatagtaactgcacagataaatacaaaatattataatactgtaattgtgatgtgtaaactactcatatcttaagtaggaagactaaaagacggactgacaaaaaaacggcaactacaacaactcaagacacacagtattaaaatataaacaacaaaaagtttaaaagcagaggagataaatttaaagtatagggtttttattagttttctctttgcttgtttgttggtttgtttttgcaaagttaaattgtcatcagtttaaattaatgggttataagatattatttacgagcctcatgctgacctcaaataaaaaatatgtaagagatacacaaaaaatataattcaagaaatcactttcacaaggaagacaagaaggaaaaagaaaaggccacaaaacaaccaaaacaaataacaaaatgtcagtagtaggtctctacttataaatattaaatgtacatggactaaatctccagtcaaaagccacagagtggctggatgaatttttaaaaagactcaatgatctgttccctataagaaacatgatttgcctataaagacacacatagactaaaaataaagggagggaaaaaaaatcccatgcaaatgaaaaccaaaaaagagcaggagcagctatatttagataaaatagagcttaagacaaaaagtatggaaagatacaaagaaagtcatataatgctaaaaggatcaattcagcaaagggatataacaattgtaaatatatacacacccaacaatggagcaccgagatacataaagcaaatattttcagagctaaagagagagacagaccacaatacaataattgttggagacttaaccacttcattttcagcattgcacaaatcatccagacagaaaatcaacaaagaaacatcggacctaatggacctaatagatatttacagacaatttcatccaataactacaggttacacattctgctcagcacatggatcattctcaggtatagaccatgaaatattaggacacaagacaagtcttaaaaatccaaaaaaaagctgggtgcactggctcacacctctaatcccagcactttgggaggctgaggcaggtggattgcttgagctcaatagtccaagaccagcctgggcaccatggtgaaatcccatctttaaaaaaaatgcaaaaattagccaggcgtggtggcacatgcctgtagtcccagctactcagtaggccaaggtgggaatattgcttgagcctagaaggttgaggctgcagtgagttgtgatcgcaccactgtattccagcctgggtgacagagcaagaccctgtctcaaaaaaaaaaaaaaaaaaaaaaaaaaaaaaactttcaaattgaaatcatatcaagtatcttctctgaccacaatggaacaaaactagaaatcaataatgagaagaactttggaaagtataccaacacattgaaattaaacaatataatactgaatgaccagtgggtcaatgaagaaatctcttttttttttttttttgagacagagtttcgctcttgttgtccaggctggagtgcaatggcgcgatcttggctcactgcaacctctgcctcctgggttcaagcgattctcctgcctcagcctcccgagtagctgggattacagccatccaccaccatgcctggttaatttcttgtatttttagtagagacagggtttcaccatggtggccaggctggtttcgaactcctgacctcaggtgatccgcccacctcggcctcccaaagtgctgggattataggcgtgagccaccacccccggcctgaagaaatttcttaattaaaatttaaaaattcctcaaaacaaatgataatgaaaacacaacatatgaaaacatgctgcaacctatgggatacagcaaaagcagtatgaagagagtttgtaacaataaacgcctacaccaaaaaagtaaaaaacttcaaataacctaatgatgcatcttaaagaactagaaaaccaagagcaaaccaaaccccaaattcgcagaaaaaaagaaatagtaaggatcagagcagaaagaaatgaaatttaaattagaaaaccacaaaagagcctgggcgcggtggctcacacctgtaatcccagcattttgggaagccaaggtgggcggatcacctgaggtcaggagttcaagaccagcctgaccaacatggtgaaaccccatctctactaaaaatacaaaaattagccaggcgtggtggcggacgcttgtaatcccagctactcaggaggctgaggcaggagaattgcatgaacatggcagtggaggttgcagtgagccgagattgtgccactgcactccagcctgggtgacagagcaagactctgtctcaaaaaaaaaaaaatgccacaaaagatcaacaaaatgaaattttttcaaaaacataaacagaattgacaaacttttaatcagattaagaaaaaaagagataagaccagagatgcaaaaggaatgattgcaactgatactacagatactcaaaggatcattagagactactatgagcaacctaggccaatacattagaaaacctagaagaaatagataaattcctagacacatacaacctaccaagactgaatcatgaagacatccaaaacctgaacagagcaataacaaacaatgagattgaagctgtaataaagtttcccagcaaagaaacacccaggacctgacagcttcactgctgagttttaccaaatacttaaaaaaacctaataccaatcctactcaaactattccaaaaaatagaggaggacagaatacttccaaactcattctacaaggccagtattaccctgatatcaaaacccaaggacacatcaaaaaaagagcttaatattaattcaagaatcctcaacaaaatactagcaaactgaattcaacacattaaacagatctttcatcatgaacaagaacgattaatcccaggaatgcctggatgctttgatatatgcaaatcaatgatatatataaacagaatgaaggacaaaaaacatatgatcacttcagttgacgctgaaaagcatttgataaaatttaacatcccttcatgatgcgatccctcaaaaaactggttatagaggaacattcctcaacacaataaaagccgtatatgacagacccatggctagtataatactgaatggaaaaaaaacctgaaagcctttcctctaacatcaggaaaataaaaagaatgcccactttcacaactattattctacattcaacatagcactggaagtcctagctagagcaatcagagaagagaaagaaataaaaggcatccaagttggaaaggaagacgtcaaattcttcttctttgcagatgatatgatcttttagttggaaaatcataaaaaatccacctagaaactattacaactgataaatttagtaaagttgcaggatacaaaatcaacatataaaaatccagcagcatttctatatgccaacagtgagcaatctgaaaaagaaatcaagtaatcccatttacaatagctacaaataaaataaaatacctaggaataaacttaacaaacacagtgaaattacaatgaaaactacaaaacctgatgcaagaaactgatgaggacacaaaaatatggaaagatagtccatgctcatggatttgaagaataattattagtaaaatgcccatactacccaaattaatctacagattcaatgcaatccctatcaaaatatcagagacattcctcatagaaatagaaaaggtaatcctaaaatttatatggaaccacaaaagacccagaatagctaaagccatcctgagcaaaaagaataaaactgtaggaatcatattacctaagttcaaattatactacagagctatagtaatcaaaacagcttggtactgagataaaaacagacacacagaccaatggaatggaatagagaacccagaaataaatccatacatctacagtgaattcattttcaacaaagatgttacaaatatatattggggaagggacagtctcttcaataaattgtgctggaaaaactggatatccacatgcagaagacactagactccaatctcttgccatatgcaaaaatcaaataaaaatggattaaagacaaatctacgacctaaaacaatcaaactactaaaacaaaacacgggcaaaagtctccaggacattggtctgggcaaatatttcttgagtaataccccacaaacacaggcaatgaaactaaaaatggactaatagaatcatatcaagttaaaaagcttgggcacagcacaggaaacaatcaacaaagtgaagagacaatctactgaatgggagaaaatatttgcaaactacccatctgacaagggattgataaccatagaatacataaggagctcaaacaactatataggaaaaaaatgtaataatccaattaaaaaatgggcaaaagatctgatagacatttctcaaagacatacgtacacatggcaaacaggcatatgagaaagtgctcaacatcactgatcatcagaaaaatgcaaatcaaaactacatggtatcatctcaccccagttaaaatgacttttatcccaaagcaggcaaaacaaatgctggtgaggatatggagaaaggggaaccctcgtacactgtgggaatgtaaattagtacagccactattgacaacagtatgggggggttcctcaaaaactaaaaataggaactaatatatgattcagcaatcctactgcttggtatatacccccccaaaaaaataaattagtatataaaaaagatctctgcatttccatgtttattacagcactactcacaatagccacatgaccatcaacagtcatgcagtagtatttagccataaaaaaggatgagatcctgtaatctgcaacaacatggatacaactggaaaaccttattttaagggaaataagccagacacagacaaccttcacatgttctcactcatttgtgggagctaaaaatcaaaacaattgaactcatggatataagagagtagaaggatggttaccagaggctgggaagggtagcagaaaaaaggagatggttagtgggtacaaaaatacagttaagatgcaataaatacaatctactatttgatagcacaactgggtgaatacagtcagcaatactttgttgtacattttagaacaactgagagagtacaataggaatgtttgtaacacaataataaaagcttgaggtgatagatacctcacataccctgatgtgattcttacacactatatgcctgtattgaaatatcctatgtgccctgtaaatattaatatatacacctctatatcccgtaaaaattaaagagaaaaaaatttaaaaaggtgaactgccaaggcttcaaaccttctactgcatctcccggacaggagatcctaggcaagttatttaacatttctaagactcaaaccctcatcttgtcacttgggaatgacagagatttctacaagtgttgtgaggactaaatgaaatgctgaacttacaggctttagcacagaatctgcacaaagtaagttctcaataaatgctgactgctattaattcattttactaaataaagagagacattttaatggcaatatccaatactagtgagtatgaaaaatcaaaccctgttgctattgatggtgctgatttgataattctcctttttaagttgtagtcatggttatgatttattacagcaaaaggattcaaagcaaagtgtgcaaagggaaatggggcagactctagaggaaactggtcacagctttcaggagctgtgtccctgtgcagtcacacaggctgcacttcattcctcctgcaacaaattgcgacaacacacccacaatttgtgaaatttcacaattgtgagacctcgcaattgtgagaaatgtcttctagataaagacctagtgcctagggttttttactgggggctggtgatatgacaattcttctgcaaagtaattcagaagtatctagagctccccctctgtgactcagtactatagaaaacaggcaaaagcacttaatgcagatacgctgatgttaataataataaattagaatctaaatggaaaataggacatgagagactagtaacatagaacatttctactaaaacaaaatgtgaaaaaagcagaaatatataaaccttataataacgatgaaatccaatttcattaaataaacaagtaatcagtgataactctatgtataaactgtttttgtcttttcctttttctaaactttgttatatgactaaatttcttctaaacttaaaaacagtattttaataaaggatatttcttcatgttgaaattaagatgtaaaataatgcacgtgtcttctttttgcactgtgcttccatctggcttccgttacacaccctcagaacctggacgtcaccaaagccagacgctcgaggtggtgccgttttctcccagcctacaccaaaatgttgatccctagctcctagatgacgcatcccatctaagcagaaactcaatgaatgctacttaaagaaacaaacatacaaaatatataacttggccaaccaaagaggaacctatttgtcaatgaatccttgaaaagtagctgaaaagaacacttggagaaaagagttaaaaaatatttttaaaagaatcacaaaaatcatgcagatttgaatgttatcgtaagtattaacagagagggcagtctacaccttctctgaaaggaaatacgaaagcagagatgcagggggacaggtgggcataagggtgtggagagctgagcttctggaaacaggcagaggctgtttggcgctctgaagagggtctgggcctcaaaccctcctctgctgctccttcctagctgggtgaccttgggcaagtcaacaaacctctctgggcctgtttgcttatctataaagtaggggtaataacagcacccaccttatggggttgttgggaggaagaccctgaacttagaagagtgcttgatacctagtaagggcttactaaatgttgctttttcttcctccaggactcatactgaagagacttgaattctctgtacaggcctggagccttcagtgggagaggcacacaaataatctcttaaagagattgccccctcacaattacatgagctcttatgcagaacacctgcctctatgctgcaacagattgaacgtttatgtctccccaaatgcctatgttgaaattttaccatctaaggtaatggtattaggaggtggggcctttgggaggtgtttaagtcacgaaggtggagccctcatgaatgagatatcatctataatcacctataatctctctcccagagagctccctcactccttcctccatgtgcagacacagcaaaaaggtgccacctatgaaccagaaagcagtcctcaccagacaccgaatctgctcatgcattgatcttggacttctcagcctccagaactgtgagaagtagatttctggtgtttgtaagtcacctaatatatggcattctgttatagcagccccagtagactgagacatatgccttggttctctgtcactcaccaggagcccggcgtcttcttactggctctaccatccagggtgctttccctttctccaataaggtgatcacatttggtctccgaaaggaaagacctgtacgtgggacaaacatgggaaatgatcataaatgtgggcaccacagaagtcagagccacgctctgcatcaacaggaatgcaggtttagtagcatgaagggagcacagaggatgtgaagggcagctggagaatggggagtgtgatattgtgatttataagaatatgtatttgcttttcatccctgtttccggcacacagctccttaaaccctgggaatctcctgcatatgtgtcttttctatgttaatgagaagactgtgactgggggctcctggacagccttcagatgggggctggttgccgatcatgtgattagaggattggaactttcagccccatctcctgacctctggggaggggtcagaggctggaggttgagccaatcactaatggccaatgatttaatcaaccttgcctacctgaagcctccttaaaaactccagtggactgggtttggagagcctcagggttgctgaccacgtggaaggtggtgcagtagagggtgcatgctctgtgtccctccccccataacttaccctctgcatctcttgcatctggctgttcaactgcatcctctgtaatatcttttacactgagttggtaagcataagtaaagcgcctccctgagttctgaaagctactctagcaaatgactgaacttgaggagagggtcatgggaatccgctaatttagagctggtcagttggaaggcctggacatgcaactggcctctgaagtaggggacagtcctgtgggactgggctcttaccctgtgggatctgacactatctccaggtagacagtgtcagaattgaattggaggacacccagctggagtgtgctagagaactgtttggtgtgtgtgggaaaacctccaaacatctggtgttagagtgtgcggtgttgagtttggttgtttaaatctcacatggaaaggcaggaatctaaattatagccagtagagttgttaaattttaattcgacaaagcaaactattttcctgagaattgagtcagaaactcctgaggctggttatgaagttactgtctttctgctccagaccctcacccttctattatctgttttgtggtgccagggtgggggccttgctgtcttcacttctgcttcaccagctgcttcctgtcaacatccaccaataggggctttgttggtttctatgtctgggttttttagttctgtactcccagaaccagtttcatctggctcctcagaagtataaacaaaccaggcagcacactgccccctccttcagaagttctgagtcccagatccgaggggaccttccttaaagcgctaaaaaccccaaactcttccctttgtccctccaaccccaggaatggtggcagcatcctgcaattactgtctctgtgttacatcaatgtccactattcacctttcaacaacacctcttaaatcaattccttaaattctatcaaaagagggctgagtgcggtggctcatgcctgtaatcccagcactttgggaggccgaggtgggcagatcacgaggtcaggagatcgagaccatcctggctaatacggggaaaccccatctctactaaaatacaaaaaatcagctgggtgtgatggagcgtgcctgtaatcccagctactcgagagactgaggcagaggaatcccttgaacccaggaggcggaggttgcagtgagctgagattgcgccactgcactccagcctggcgaaagagcaagactctgtatcaaaaaaaaaaaaatttataccaaaagaattcaagagttacctacagagtttccataagacccagcaattctacccctaggtatatgccccagagaaatgaaaacatacatccacacaaaaaatttgtatatgttcatagcagcatatcaaaataacaagagtgaaaacaacccaaatgcccatctattaactgatgaatggataaacaaaatgtggtctatccataccatacatattctttggcaatgaaaagaaatgaggtattggcacatgctacaacatgatgaacctcaaaaacattagaaatcaaagaagccacatatttatgatttcatatgtatgaaaggcccagagcaggcacaaccagagagatagaaagtggactagtagttgctgaacctggggggatgagtggccaggggagacgaagagtgactgcttatgggtactgggtttttgggtggaaataatgaaaatataattgattgtggtgatggatgcataactctgaatacactattataaaaaccatttaattgtgtactttttatgggtgaattgtatagtatgtgaattatatctcaataaagctcttttaaaaaagaaactgcagtggcttccattttcctgactagacccagagtgatgcatgtccctcaataggctggttctggattgtgggggacgaagagccttaccaagcgagaccaggttccggtaattctccaacatgacatcttcatacaaatccttctgaatggggctcagccattcccactcctcctgggagaagtagatggctaagtccccaaatgttataggtgcctgaaatgaaaaatcaaatgtctattcaccatggacttgtgcttccacatggctggaggaaatggtgcacacatcttaaacatgggagacacaaggtaccaagaatcattcaggaagcattcagggttctgaggccaaaaggggcaggtgtattaaataagttaaataaaatacaatataagacatagctgttattaaaattatgttgcattaagaacacgtggcaacctggatctaccaggcatttacaaagtcaaagcattcttctaagcacctgactgtactggctcacttagtgctcatgtgaatcagtgatagaggcactgtcagcggaatcacagtatgttacagatgaggaaactgaggcccagagagatgagaaaacttactgcaggtctcacagctagtaaatggagaagctagtgttcagcccagacagctcctgatttaatctcctaaccacttgctctccaagaaacatgtgaatatgttacacatgacaaaaggttctttgagggtataatcaaggttactgatcacttgaccttggcagattatcttggacttgacctggccagttggttattggttcttgctgtcttgaagatgaaaaatgagggtcaggtggaaagtgtaggaaggaactgaatctggccaataaccagcaagtctggaagaggacctgagccccaaatgagaacacagccggctgacaccttgatttcagccctgtgaactccaaagcagatgacccagctaaaccatgttgtgcctggacgccaaccacaaaactgcatgataataaacacgtgctgttttgagctgccaagtttgcagctaatctgttacagcagcaaggggcaactaatacacccaactgaaagcaaacacatttgttatgggaaactgcatttgagatgcctgttggaaaaaccactcaatgattgacagtcgtggagcatgctgaccacaggaggctacgcatacaacctcactgcctgcaccagtgcagtcaatggaatagcagggctatgtggtgccttttagtcttgggaccttagttaaagagatttcctccatgtaaatatgggttttacaaggagatacaaaaccacacaacaagactaactccagagcacatgtcaagtcccctctgctactgcaggccccacctgggcattcatctccatgctgagaaatcacagtggctctcatcttcctccacggaggacatttctcttggggagggcatttctcctggcactggcaaagcccctgggaatgctaaacaaacaggccagtggccatgtgcacactgggaatggagagaggctcgctgagcagtttcctggctgctgggcccttctcaggttctcatccctcatggcaacgggagaaaaccaaagactaggtgttggatggatctccaacaggcaacaagtctccatggaaggaaagcaaatggtccacatctcacaagacacgatggggtgttccggaaggaagaggaattgccacttaccttggatttggatttcccccgtgcagaaggcatcctttcctccccctttagggtccacactgagagatgggcagagagctggtaaggcagggctgtggggagaagacaggtcatgaggcagtgccagagtccacaggcccctacctaacctggagacacacacacacacagacacacatgcacacatatgcacgtgcacacacacacacagatgtcagaacacctggcgcattcctgtcccccctcacctgctcacggtcagggaagggcacggccaaccctttttgtgcctaagatcatagcaggttcttggtcatgaggcaaataaggactgcacagacctctggccatccatctgacaagtatttactgagcacctactgggtgtccagctgtcccaggtactggggggagagcagtgagttaaagtggaagagtgccggctcccaagcaccttacattccagtagggaaagaaagtccatataaagcacaatgatggacatggtcattgctatgaagaataaacaggccagggcaggggttagagtcgtggaatggtcagggaaggtgtctctgaggaggtcacattgagctgaggtctaaatatgagagcatgagccatgtgggtgctaggggaagagcattccaggtagaggcacagcaggtgtcagcgtcatgggtgggcgcaggctaggtgtgaggagagcaaggtctgtgtactgaggcagagtgagtgcagcggggagggtgggctaaggcaggcagggccggatcatgaaaggggtgctgagcagctgggatttgatctcaagtgtgacatcactgggggaggagggggagctgagaaggggagtgacaccatcagacaacatttaacaaaaatttgtggcatgtctatatggtgggttaactgtgtgtcagaagagggagcaggagtgaggacaggactcactaggtagctttgcagaaatccggggaagatgttggtggcatgactagggtgggtggagtggaggaaggaagatgtggtcagatcgcctcctcaagagggcccctctatccacccatctcaaagaatctctgccctgtatcagtctatacctatgctgtccaatgtgaatgccactagccacatatgaaaactgagcacgggaaataaaactagtggaactgaggaactcattttcttccctttttttttcttttgagacagggtcttgctctgttgcccaggcgggaatgcagtggtgtgatcttggctcactgcaacctcaacctccccggctcaagcgatcctcccacctcagccttccaagtagctgggaccacaggcacctgccaccacactcagctaatttttgtatttttcagagacagagttttgccatgttgcccaggctggtctcaaactcctgggctcaagcaatcagcccgcctaggccttccaaagtgctgggattacaaacatgagcaactgtgcccagcccggaactcattttcactccaatctattcactattaaaacaataataaaataaaatttaaaattattgctaaaattattaaaatttactgtaaatttaaaatgaaaaactgatactcaatttggttaccgtaaaactttaaagtatgtctggaacaacttgggtatgtgactctgcttttccaaaggttttaggaaattaagtacagatcaggtatctccactgaaaattaagggtctagatggaccgtgtgtataaaatttgtatcagatttcaaagactcagtatgaaaaaatgtaaactatcagtatgaaaaaataactatttcattgataactgtttatattggctacatgttgaaatgttaatattttgatatagtcagttaaatgttattaaaattaactttaatgggccagcccaatgctttgaggctgatgcaggaggatcacctgagcctaagagtttgagagcaacctgagcaatgtagtgagaccctgtctctataaaacattaaaaaattagctgagtgtggtggtgtgtgcctgtagtcctagctacttgggaggctgagatgggaggattgcttgagcctgggaggcagaggttgaggtgggccaagatcatgccactgcagtccagcctgggtagcagagtgagaccctgtctcaaaaacaaagcaaaacaaaacaaaattaactttaatgataaatgtgttgctttttacccttttcaatgtagcctctggaaaatgtaaaattatcagcctcacattatgtttctgtggggcagtgctgccacatgctctcttattgtattgccccattttccacatagcacttaccgctttctgaaaacagcttctttatgtgggtgtttatgtgggtagtacctcccccctccctaaacacacacaatgatctaggctggaaagcagagactttgttttgttcaccgctctactcccagggctgagaacctacctagcatagagcaggtgctcaataaacacttgttgactaactcaaccagatcctcagtgtgctgaaaccccatcccagagacacagttctgctgcagccattccctggccctccacatttgtctttggagaggacagaaatggggacatacttttcacttcccttactgtggaaagcttgacatcttgagaaaatgatacaatgaatgcctaattactcttcaccaaatgttaacatttttcctacccttttttataaaaaggcagttgtctgaaagttgtagaatgacagttcatccctaaatgttccagcacacgcctccaaagaatgccatcgtcataccctgctgccaacaacagcagaaatatccccaaaagctttttgtgactttgtaatgaaaaaagtacagcaggacacagcctggaaaatggaaataatggatgttccctctacagatgtttgtttcgtccccgtaggggtggaggtagaagaagataaatccaaggccatcaggcttgagttcagagttaggtaatggatatgttttgatacaaaacatggatcctaagatggccttatcctatttaagagaagctaggcagaagaatgcttggattattacatgtctctctttgtaggatgaagttgtagtaagaatacgaatactaagatgaattattaacaagatgaataaatgttccatgtgctaagcaacactgaggattatcatttcaattctcacatctggtggcaagtccagttctgacgccgttttccagatgggaaggtggaagcacagagagggaggaatcacttgcccaacgtcataaggtagaccagtggcagagccagggttcaaacctagacatttgccccaaatgcctggctcttaaccctactgtgtggcaccctcccctctgcccatgtcagaggaaacaagctgagcagagaagatcagcagggcaggcttgaggctgctctcccaagaggcctgtgtgcagggtcagccccaggctggcgtctaaggacctggctgggagaccattccctacacggatataaaacttttcctgactgttaagaataccttcagcttcatggtgtggtgcagggagcatacaatttacgccttatgttgaacccctgctttcctcctgggagtctgcaattttgttatctgccaaccagagaatgccgacgtaaccagctcacaataacaaatgtggacactgagtctctaatgggcatgctgtgtagacagcacctcgcatgtgttgttctaactcgttactaagggaattagtatgtcactcaggactgcactgggagaggactccagggagcctggccctggcttccccaggctctgctctgtgcacccttccctttgctgatactgctctgcattttttggctgtaataaatcattagctgtgagcatgactacaggttgggtcctgggaggccctcgagaatgctggaacctgggaggtggccctgcagactccgaaacataagccagtaagaggtaacccccactctatcacacccctcagctgtatcagccttagaatgaggatccagcgaacagtcattctgcaacagatggagttgaggtgggcacatgatcaatgtcctggccccaatgggaggcagctggaggtgtggtttcccagcccctcaggatggtgccctgagccacaccccacttctctggtgctcttgttagagggacccctggttaccaggcctctggtttaataaaacatgactagagtgactctgtcttaaagtgagtagctaggcgctcacaaggcccctgctataaggttaatgcttacagtatgaaagtagccacatcctgagctgaccacctattacaattacagaaaatttatagacacacagaacatctcccaccaagcctgcagaatgtccagatgtcctgagagtgcagcccactttactcagagataacatcaatgaccaggcttaggctgaaggatgaatggtcattgatagcacaaacagccctacctttagtgagtgcatctgcacattccaggtttaatgacagctccttacagtttcccattccttctcctgctttctgagaacaccctactctataacagggtagtttccaataaacttgcttctttcactgtgctctgtgactcaccttgaattccttcctgtgcaagatccaagaaccctctcttatggtctggattgggaccctcttttccagcaacactcactgggcaagaaggggcggggtcccatgcaggtgagccatggtccaggaggggcctctaattagcactgtgtgccatgccggccacatcatgctaaggggaatacttgacttcatctgcctgggaatggggtgggggggaaatgagggcactgtgggcattagtgactgtggtagaccagagttatggccacccccccaaagatatggacatcctaatctccagaacccatgaatatggcaccttacacagcaaaaggaactttgcagatgtgatgaagttaaggatcttgggggcgggggaaattatcctgaaaatggaaaacacacaaaccatttttcctctgctgtcacaccacaacaatccatgaccacatgtgtgaggagttttccacacaccaagcaagcaatcatttctgcagcggccccagctgggtgtcctccaactcaattctgacactatgttcctggggacagaatcagatcccagagcttgaggtctcagcccccaagactgccccacctgccccaccttcagataccagttgcaagtctggacttcaggaatgtttgactgactggctttaagctggggttcccacaatccccttttgggttcaattattaataatttgctaaagcagcttacagaactcaggcaaatactgacatttactggttgattatgaaggctattccgaagaatacagagaaagaaatgtgtagaaatacaaggtatgtgtgaggtggtgtggagcttccatgccttccttgggaaccctccaggaacctccatgtgttcagctatccagaagctcttcaaaccctgtccttctgagtttttatggtggcttcattacacaggcaagattaaactactggcccttggtgatcaacttaacctttagtctttctcccctccccagaggttgaagggtggagctcaatgtcccaactgtctagtcctgccttggtcttcctggtgaccaaccctatcctgaagctacccaggggctgccagccaccagccatctcattagcatacaaaagacatgtaaaagaaaagggcatggtgcctcacacctgtaatcccagcacttcgggaactgcttcaggcaaacctgtttcccattttattactaaccacgtacctccctcacaatatgcccaaaagaaaattctttttggacagaggacacacagaactcatgagataaatgcatacctgattgctccctttgccctatttcactaagccagaccaaggcataagtgactactcctctaccctcctgtcacatgtaaactgtgtgttcagtgaaaggctcatcagagacttgaaggaatgcaactgtttgtctcttatctacctatgacctgaaaggcagggcccttgcttcgagttgtcccacctttctggaccaaaccaacgtacatctcacacatactggctgatgtctcatgtctcccaaaaacatataaaacctagctgtgccccgaccaccttgggcacatgtcaggacctcctgaggctgtgtcacaggtgtgtccttagccttggcaaaataaactttctaaattgactgagacttgtctccgatattttgggttcacagacatcactttagaaattgtaagatttcaggagttttatgccaggaaacaggctaaaggctaaatagttatttctcaatagcacaatcctggattgcccaagtgggctcaacataattacaaaggtcctctttataaaacggaggcaggaggatcagagtcagacagaaaaagaaattgcaagatggaagctatgctgctggccttgaagatgaaggagcacctgctgccatggcttcgtagctctgcctttcaggactgtaagagaataaatgagtgtagcttgaagccatcaagtttgcggcaatttgtcacagcagcaagaggaaatgaacacagtgacccttccactatttccttccagtcctcatgcccaataaatgggcttcttttgtcagtgacctggtgctgaaaacatctgtaattcaggggaattacagggctagggtgagatgaagaggtcggctggtgatcgctgaagccggcctgtgaggccactccaagaggcagaaaggagcgctgaaacatcagccctgcctgcctccctcttgcacacgtgcacacacacccacgcacgcacatccagagctccctcatgctgaggaagctcagggtcctgccttgttttagccagggtcagagggaagggtgaggcggcccccagtggtggtaaacacatcactctggggtcagactgagggtggcaagtgttcctatcagctgtgttaccctgggcaagccactgaacctctctgtgccacagtttcctcacctctcaattggggacaatacagaacctacttctggagggagttgtaagaatgaagaatcacgtttgggtcctacacccccacccccatgccagtgcctccctgctagtccctgaaggggctgccacagccccacctcacttccttcagtctgctcaaacctcaccttctcagcaagcctcactaaccattctatttaataatgcaagctgccccccaccacccttcacggctggttcagatattttttttcagcagctcttatcgtggtgtaactcgctgcagaatttgcttattatgcttactgtcaaccgtcctgaggacaggcaactctgtattccaagtgccttagaccagcatccagcacacggaaagggcttaagtgtttgctaactgaatgactgaatggctttgtaataaatattaactttctttaccaacactttttcaaggagccttccctcacccactaaaccggggtaggggtatgcttcacatgtatcaggtgccacttcttcacagcggaaacacattccattgtgagcacatttgccttctggctttatctcttgtcctccaccggacaatgcattgaccaatgttctcatgtgtgcagctgtgtgaccttgggcaagttactgaaccttgctgggtctttacctccctcctttacatctgcaaagggaggacaaagggctgctggaggatgagatgagatcatatcagtcagtgctccgttaaggtaaactctatttaccctcactgctgttgaggttacaagtgccaggtggggccagttctgtgggatgtgagtttgggaaaaggtcgcattgaccgtccttagcccacatgctctatgcacgtgctcaggtgtgtgtgctgaatgtgctccatgcctgggcagcagcgtcacctcctcagttaatgacgatgagaatgaaagctgtgctggctcctttctatgcatcacaccatctcctttaaccttgaatggcaaatcaaccacccagggtcctcatcttccatcgcggggatgagagagggacgatgacccgcctgttgtcacagagctttaactgatggagcctggatttgaggccctatccacaagccgcacactctgcactcctcacacatggcaggagtccactatccaccctggcagggcacgggaggcatcggtgtggtgaaatgcttccggaaaacatccccatatgtatgtttctgtcatagtagagtggccacaggagttggggaaaatttgagcatatcatgttaagactgaggagcgagggctcggtgacgaactgagcagactggccttcgattctgacttttctgagcgaggtttccttcgtacagagatggggaccaagaggcctgccctgaatcctggacacctgaattctgggctgtgttagaccctaggacaacggtgtgctggggaatgtttaataagcagcttgctgcaggggtgatttatagtgtttacaacttccatggagtaaatactctgatatggtttggatctgtgtccccatccaaatcccatgtttaattgtaatccccaatgttggaagtgggacctggtgggaggtgactggatcttgggggtggatccttcgtgaatagttgagcaccatccctttggtgctgttcccgtgataagagttctcacgagatccagttgtttagaagtgtgtagccccaccccccctgcctctttctcctgctcccaccatgtaagacacctcctcccactttgccttctgccatgagtaaaagtttcctgatgcctccctgaagctgctatgtttcctgtacaacctgcagaaccgtgggccaattaaacttttctttaaaaattaccagtctcaggtatttctttatagcagtgtgagaacagactaatacacactcccaccacagcaggttgtaagctattgaactgatgtcacctggcatggggctgaatggcttgggtgagccagctccagcacaccactgctgcagggcctttgagaacaaagccctattctttgcctgggaattcttaaactttgggcagatatccctgaagagtacaggagggctaatgcctatttctatggtttgagatatatcccaaagcagctgcccataacagaaaactcttttgatttcttgttttgaaacacgttcatttgtgcatattacttcataataaatctgggtttgtgttaatgtaaaaatcatgttttaaatgatttaccagataagcagatcagttggctttccccttccaattacttaggtaaaatgacttgttccaggaagttgtaatgcattcatcccgcagttttcacaggtgtgtgcactcagccacgcaccccaaatttgagaagatgattcttgtctgatatggtctggctgtgtccccactcaaatctcatcttgaattatagctcccataatttccacgtgttgtgggagggacccggtgggagataactgaatcatgggggcggtttcccccatgctgttctcatggcagtgagtaagtctcatgtgatctgatggttctgtacagggactctcattctccctgtggccatgtaagacgtgtctttcaccttccatcacgattgtgaggcctccccagccacgtagaactgtgagtctgggtatgtctttatcagcagcacgaaaacagactcatacattgtccataaaataattttcttcaaggaactcggcactactggggaagaaagaacagcagtttgatattaggtaatcctggattcaaagcttgcctctgccaattactggctgtgaaaaagttacacaaagcctgtttgctcatctatacaatggggtaaagaaaacctacctcacctctgctgttaggatatttacatgtgatgtcttcggtaactggaacatggtcattgcttgccttccttttccttttcaactcacaatacagttgacccttgagccatgttagtttgaattgtgagggtccacttatatgcagatttttttcaatagaagttacactgagtgtgcctacctctccggcctcccccttccggctcctccacctcttccacctctgagacagtaagaccagctcctcctcttcctcctcagcctactcaacttgaaggccatgacgatgaaaaccactctacttcatgaacagtaaatatattttccttatgattttcttaataacattttcttctctctagcttattgtaagaatagagtatgcaatacatgtaacacacaaaatatgtgttaatagactgtgtaggttattgcttaggtgtcagtaaggtgaccagtagactattagtacttaagtctttggggagtgaaaactctatgtggattttctacagtacagggggttggtaccactaacccctgcactgttcaagggtcaaccacataccaagcatccaagagaccaacgaagactgagacccactaaaaaggctgagattagaattcttatccagtgctggaggagataaattggtgtaaattcaatggagggcaatttggcaatgtctttaagaccgaagatacacgttatttacccctgttgtactctttaatccagcaaccttatttcctgtacatgtcttcagacatctttgcacatgtgcacaatgagagacacacaaaggtattcacaatggcagagtttatagaaaggggcagtacatttccttgggtaaggggtgggcctgcagcaggctgtctatgttcagtatttaactctgccgtccgctatctgtgtggacttagacactctatgtgtcctctcccggcctgagcttcctcatatgtaagatgagacaaaacacagtaatgacttcacagggttgtggtgaagatcaaatgagtcaaaatacgtaacacatttagagtggtgccaggaagcagggccaatgctaagattttcattattactaccaccatcaggagattggaaacaacctaacagcccatcaataggagaatggctaagtgaatattacatgcatataatgagacaccacatattaaaagaaacaaagtagaaccatagtagtgattcctaactgggggtaattttgccccctatgggaaaactgcaatgtctgaggctatttttggttgtcacatctgggagtaggggtgcccctggcatctagtgagtggaggccagggatgctgctcaccatcctgcaatgcacaggacagccctccagagcagagaaggatctggttcaaaacatcaactgcgccaaggctgaaaaacctccaagataaaatggtattataagggcaaaaacatagaaaagtcatttagaaaaaaacaaaatatagtatacaaatacatgactttgaaaaggctctggaaagataaacaaaaagtttgtagcagtgactgtccctgaagaaaggaaccaggttatatgtgtgagtatggaaaaatccaaaacccgctttggcattttgtgtcatgaacgtataattacatcttcaaaacaacaaatgaaataaaagaaggctggatcgcacataccacatcaaggcagggctgtaaacctggctcgtcttccgagtccctgatgatagatgagaaagggctttgaaaggcacaaagctatgtcctcctgaggtgaggacggctggaacctggatgggaacatgcttcaaagagttactgaaccgtggttgtgcctcccttctgaggcaaataactgaggggccttcccctcctgccctggcacccctttgagccttgggggctgtgctgggtattgaattgggggagggtcctgatatactgaaaaccagccattaaatgcactgccacagcctcattgcctcctttgggccagtcagcttttgctgtaccagctgtcaaatattcaaaaatcactcctggcctgaacctgccagccccagaggccagggacatacgtaggcaatttctccaaagacgtcagcacagctgtcacaggaagaacacaggctatgcatatgcatgtctagcctgccatttccccactttgcccgggaacacattaggttacctcacttgcaggatggggctaggaatacccctactgcagggaagtgcagctgtgaggactgtttttgataagatagccaagcagaggtcacttgcatcctccccctgactcctccaaatcaatttatctcattcccagaggccccaaaggagcctgagctgcaggcactcagagctgtagctcttaaccctgtgcgtacattagtctcttgggagctttctaataaatagtcacagctgatggcagttcactatgccagaccaattaaatcagaatctctggggattgagtctgacccgcccttttttttctttttttaaataaagcattccaaggtgagagtaacattgaaggcatcgtttagaataacgttcgagtctcagagtctcaaggacagggctagagatctgacctctttctgttgaagtccagacctcagtgaagagaaaagtctttggttaagatcaaagtcaaactcttagattccccaatcaagtgataccaaagggtcactgctggtggtccttcctggctctggagttgaccaaaatgcccatgggagacctggatgttgactccaaaaagaacacctgccaaacaccctgtaatccctttaccctgctttacttttcaaagtacctatcagcacctattatagactttatttttgtctctcctactaaatgcaagttccagctgagtaaaaaccttgcctgttttgttgagagactagcacagtgcccaatccatggtaggcactcactggctgaatgaatgaatgcatctcggagcttacccgggctgcaggccgtttcttctcatctcagaacactatccttttatcatctctccgtgccccgccttccccagctcccttactcttctccctgtcatcatgccttcggtctgtccatgcgcttgcatcacggtcctctcaatcagagtgattttgcccctgcaggggacatctgacagtgtctggagacatttttttttcgcttgtcacaacccagagggaggcgcggtgtgctactggcctggtaaatagagcccagggttgctgcacaacatcctataatacatagaatagcagcccctcccacctcccaacaaaaaactatctggccccaaatgtcacagtgccaaggctgtgaaacactggtctggacagaaacatttccagacccatgtgttatatggaaacatcccttagtccctgacacttcaaagttctgttcttgaccccatgggctccctagggacatctccatcaggaagatcctttgttcctgaccccacctcctctaccctaatgctgccctcccaggaccctgcctacacaattctgaacctaagccctgatctagacgtccaagttattttacctctggacctgcaacccttactctggggctcatccttttgcatttctacctatggattttattctccaggtgtgggacgcctgcggttattatgctaataataaaacgatgatcattgatgtggcacttccttgtgccaagttctacttatgctcaccataaacctgaggttggttctgttattactactgttttacaagtgaaccgaggagtggtggacttaagtaagctctctcagtcacacagccagccagtggtgaaaccaggagtcaacaccagacagcggggcgccacagtccatgctcttatttttccaagctaccttggtaggaaggggacacaaccatacttagcgtcagtggagggctctgtcctccactcaaatgtacacatgcagaaaactgacgacgcaggtggttggcgggggcagcgcaccactgctcaactggagatggtcagatgccctggtatgtggacaaagatagcccagtccgaagctcagagatgcaaagtcctccagtattcaccactacctctgcctctgtatagggtcaaagaaaaacgaccaccagcaccataaccaacacctaaacacggtgattagtatgtgacaagctctgtgcagggtgtttcagctacgtcatcccatttaatcttcccaataacacccaggcaggtgctattaatatgctattttaccaaggaggaaagtcatgcacaattaaacagttccacagatttccagggcagcccatcacatcttagagctgctaagaattcttcccctgtgggcctccatttccatggttacagtgagatatacaccagaaaggcacagtcacacactcataaccgcaaagccactgacgctaagtggcagacagacgcccaggcaagtcacacagtaacccaaggctacaataaacgcccacatcagcctgacactgacacacgcacacactccagaaacacaaatcttcacagtcagcgtcacacacccactcccggcttcccaatggctccattgtttccttcgcgtgggtcacgcagcgatacacatccgcggtcccgacatagctccctcacacacaggcacacacggctcgcctcacacgcggcgccaacttcacacttgggcgcacaagccccgagaaccacagcagcgaagggcgcaaaccccacgccgtggcgggccgagaacccacgcaggcgcgagcccaccgcccacgcaagcacccgcgcagacgcccacgccatcgtggatgcgcaaacccacgcgcgccttggcaggaacgtccacgcagtggcgggcgcgccgcccacgccctcagacacacccacactctcgccagcccccttacctcggtcttcccgggctcagaccccggcggcgaccaccgagacagccgagcagggactcagcgcctgcgcactcccctccgggaccccgggaccgcgcgctgcaccccccttcacacacgcaccacgcatgcgggcgcgtggccccgcccccaaacaaggccacgcggcgtgcgctcacccgcctctcggggacagtaccaccagccccggcctgaggccccgacccctcagcgccacacgcacaagcgcgttcgcacgattggtgcaggcggacgcgcgaggtcccgcgcctgcgcacacccccgaggctggcacgcacaccggtctcctaggggactggcgcctggccctgcttttcatcctctcaggagatcacgtgtggacactgaggcccttcctcgagctctttaaccaaacccaacctccccaattcgccgccttccccgctcccacaaccacacgttcccgtgtgagggcttattgcctccagccagccagcgtccttcgcccccacattcacgaggtttggagccggcctcacccgcggaggcggacaccgcccacccgcgcgtgcgcactacgcagtcatcctgcgacctccagaatccaccggggtgcagcgaggctgtggaaagtcccacccagaacgtgaggtgaagaaggcttgggctgcgctggttctgctctgtccgggtcggagatgaactgacccgggagagcagcggagggatgtttcttttggccaacagtggggactcacctgcacgttttgcgaagaggcccacagtcctttgcgtggcgctcggactacatttcccaacggcccctgcacgccctgggggctgttccatgcggtgttgcgcctgcgtagccggcgggctggcagtgagactgactgcgtcggggttgagactgggtggatgaggctcaccccggcggggagaagggacgaggaggggcggacagcggaaggtccgggagtgtccgccataaagtcgtttgaggtgaccgttgcgtaattgtgagtctgtgagagaagatgtgaagtatggcctcgtcccggtcatctgggcgtgcgggtcccgggttttgatcgcgcgtttgtgtaggtgagacccacattgtgttaccctgaacatgtgtgaggacgaacctttgtgttttcttatacgtgtgtctctgaggcgatttttgtggttttgtacgtggcggggggcactgattttgaatatgtgtgtatgttctggacatttgtttagcttctgcatccacttctgcggaagggcagagttgagtaggtgggaacaggtactgtgtggccccacaaagcctgaactatttactgttgactctagagcccagtttttgcggtgtgtacgtctctgtggggaaccacacattttgaatatgtatacttgtgtatatttacgtctattctatgactgcttttgcacaatggcagggttcagtacttgcagcagagatcttgtggcccataaagcctaaaatactatccgactaaggtttcgagccgtagccagtttttgtggatgagtgttgtgtgtgtgtgggaagccagtgattgattgattgattgattgatttgggacggagtctcgctctgtcgcccaggctggagtgcagtggcgcgatctcggctcactgcaacctccgcctccaggttcaagccattcttctgcctcatcctccctagtagctgggactacaggcgcccgccaccacgcccggctaagttttttgtatttttagtagattcggggtttcaccatgtgggctcttgacctcgtgatccgcccgcctcggcctcccaaagtgctgggattacaggcgtgagccaccgcgaccggccaaggaaagccagtgtttttgactctgtgtgtgtgtacccgcctgtgtgttgagacccagtttttgtagttgcataggtgggtatatgtgtgaggggaacccagggcctgtgatttctttcttcccaggtgactctgagcaagttttggggactaggtagtagggagaatgtgtgaggaactagttttggtttcccatttctgtgattaggtagtagcaataataaaaataaaagctaacagatactactattaggacttttaccattacctctgtgactagcagctagcacttactgattgttgtccctggtcaaaagtgaatttttccatttaaggttttctttaatcctgtaagccgttctctgagttgttccttggagcaagtttctttctagactggagattgttctaaatacctggtaatactagaataaggggtgtggtcaagagatccaagaaatcttaggataaatctgtcacttggcagtttctttgttttctttaaaccacctcccaagaaagtatgtcatcctttctgctgttttaggggcatgttagtgcgaaaatctgggaaaaagctttatgcctcagactgtcctagttcagagaaaccagagtgtgtgggtcggatgtcttggctcctgatcaggctctgttgtgcccattctccgaataaagcaactatctcccaagacacccatgagttttctaagacagtttgtcccagagcccaggtccagaatctagtcctggtcttggatttggtcagaccttccctcactctcacctcaggactccccaccacttccccccctgccccaggaacccatgggaattacaggcataaattaaatacctgatcctatgacagctccagagtatctggaatcttttttttttttttttgagacagtgtcttgctctgtcgcccaggctggagtgcagtggcgtgatctctgctcactgcaagctccgcctcctgggttcaggccattcttctgcctcagcctcccgagtagctgggactgcgagtgtccatcaccacacccagctaatttttttgtacttttagtagacacggggtttcaccttgttagccatgatggtttcactctcctgacttcgtgatctgcccgcttcagcctcccaaagtgctgggattacaggcgtgagccaccacgcccagcccaagatttaatttgttaaaaaaaaaaaaaaaaaaaaaaaaagtagggtaaagacgctagaaagtctagagaggaaggagggattattttacacaggatggtcaggggaggccactttgataggtggcatttagcagtgaggcttcctgaactcagcatgactgctccgcttggctcagattccagctctgtccactgtagttgaggaattatccctagacagagaatggggagataaagaggctcagcttgttaacaggttcccctctcacatgaatcttttgtccactgcctcaaaactgccccgatatagtttaatttcgtagtatgctattgtgtcatgctgcaactctttcagctccaaaagggatggcaccaggttcaagaggctgaagaagagactcagatccaggaaatgaggcataggttatatgtgagatggaacttacatacagagtggtccagtggtggtaggctgaacaggagaactgccaccgcctgcagaaagcatggactttgtatagcattttcacttaatactctcctcctaacagcatccacatggcaaccctcatttaacccaagacaaagagcctcagcccccatagggccagcgttccacaggacaggccagggactcatttaacccaagacaaagagccttaatcccctatagggcccacgttccacaggacaggccagggactcaggcatttatcatagataaagatgaatctccatgttggtcatatttggaactccgaacatgtattcaggtgcgtctgccatgctgggtcattttcagagtatgcttaagttattgctatcagtgtctaccatacacagttggatctaccatacatagttgcatctgccatatgctatgataggaagacttgtctagtacaagcttctgtatcatagcccatagcagaactcatatttgtgagtattgtttgaagggattaagcagagagaattgagtcaggatatcactggggaggtatacagtttatttgtgggatttcaagggcctgaattgtgacaacagaataaagttcttgtgggagaaatattttcagaggatttgagagcatggtgttgaagagttaaggaaacagcatatatcttttcgtgctagatgcttacatgcaaatgaatctccttatgctgtcacaaatgtatgcttctctctccctccctttcacttatcagtcacatcccactagtcctggagcttctcctaccctgaggtcaggcatgaaccctggtgtgtagttttgctcaaatgcttacgatcgataacccagttgtgcaccaggtttctttatatcttgaagttatctactgaacacatgaaaaataaattcagcaaattatagaaactacgagacactgctgtctaccctttgacaaacatttactcagtgttgtgtgctggcttatttgcattgtgttttgcaaaagtcttaaaatcacagtcatatctaggtttttttcaagcaattctcctgcctcagccccctgagtagctgggattacaggcacctgccaccatgcccggctaatttttgtatttttagtagagacagggtttcaccatgttagccaggttggtcttgaaatcctggcctcgatggtatacacattcctatggaaggcaagcattatcttgtgaggtacatagctgatatgatgcttctgcatggtcttcaaagaaggggggccttatctttcaagaaactgaatgaaactcttcttaaagcaaaaataaggctaaagagaatatgactgtttaagatctacaacttcatctgcttatatgtcccatctccggtcctaaagccaactctttcctcatcaagggtccaactttggcttgggagacttgtgtagttgagaaattgagcctgagtcacctcttccaataagtgcatatgctcggacttgagctctgcctgccctctgactgcaagagatgacagtttctttaaatgctccttttgatattcacgctttagaatgctgattaaggtatctgagattgttattttctctgctctttgcattagtagcactttttaaaaggcacctattccacagtcctaatggttgctatttctgctgtactaatcaaaggctagaggtactgcacatggcagggcattcttctgcacctatatcccatcacagtatataatcttagcaattgtactgtgaaagctggccaggagctgtctgtccttttgatgtccgtttccttgatgcttagtgatatagagcatttctcatatacctgcttgccatttgtgtgtcttattttgagaagtatctattcaggttttttcccattttaaaatcagattatttagttttttgctatcgaattgagttccttacatattctgaatattaatcccttgttagatgcatggtttgcaaattactctttcccaatctgtaggttgtctctttacctgcccaaggcttatggctgccagtgaattgatttgaggctgcctgccagtgaattgatttagggctgaggccattttagtcagccagcagtgaagtggtctgggacatgggaccctcctgtgtgggtggcagattctcttctggcctggggtggatctaaaatctctgttcatggccaccattctgtactcaggggccttgaggttctgcccagtgctgtgttttactgtggcagggcaagtacttgtaccatgcacgtttccctctccttcctttaaggccttccgtgctatgctgcctagggttggaagaagggaggtgaggccagtgggagagtatccttcttactgtcttcaattgtctttccttgttatgctaagaccaggtactgtgatctttcatctagtttccttagctcttgtgaatatattttcttgcatggatagttgttgaaatttattttcctgcctgggggtttgctgaagtgttccttcctgccatcttgctccacctctctgttccttgaccttttctagtgaccatgtcttctaccccatcagccactcaactaaaagattaccccacctgtgtttcattaataatgtatgtatttccaccatcatttcaatgtcacatatctatattttaagaaaatgtgcattagcagctactccatttccacagtacttcaactcgagaattacaattgagtgatctaccttcatcttactatccctttcctctcatgagctaatttacttcatagcccacattgagatgctgaaattaattactttagtcactttaattactttagtcacttctttgcattttttgctagagagaattcatctgataaacactaatcccaagtaaactcaactttaaacatgacaggagatgaaaccagaaaaccttgcttacttatctctctttaaccttaatgtccacttacaccaagacttgttgcctgagaaaacatcataccttatatttctgctttaccttcagtagcttcttccaatcttctctttcatccgatgaccttgaggcacatttaatgagtaaaccaggatgggtcaggaagaagttccacatttcccaacaggacaatcatccccctgccccctcccattactgtggatgagctgtccatgttcctgctgaagggcaaccactcatctgaggctcacttttctcactgctttgcttacttgctcagggtgtagctctaataattatgagcattgtctgctgtaataattatgagcattgtctgctctaataattatgagcattgtcttccacataattttcctactctcttaaatcattctagaataataaaaatgttctggaatttcccttaatttaaaaacactgttactctaagtcatgcatactctttaaacaactcccccatttctctgttccccatttcagaaaagatcctaaaaagagtagtctttgttctttgtctgtggctccttgataacatttttccttgaacacactgggcctctaacgccaccattgaaattgctcttataaatgtcaccaaaagttgtccatgatgctaaattaaaggatcaattagtccttcttctacctaaatctttaccaagatgtgaggttgctgatgaaccccccatccttgaacctctttttatttggccatttgatgattgacaccatcattttccacgtggattacttcaacaacttgttaactcattctgtcacttttttatagtcatgtattcttaacatatcaggtagattaattttataaaaccttaagtcagatcatgttctggtctcctttaacttctccagcgactttctacctcacaaagaatagaatccagattcctcacaatggcctagacaactctaatgaaaccccacactgtgatctctcagattccactttagtcccactggcctcctgtgttcttcctcaaacgtggctggtttgcttccacatcaaggttttgtacattgctgttcgtttacctggaatgctcttcccttggggagcccagcaaataggtcaatatcatcctctccttgaggtcttcccaaccaccccattgtagactgcaggttgaaaatggaatcttcccaccctgtgaagtcagcaacctcattctttccagtgcccactgtgtggtgagcatgtttaggctttattacagggtctcagatgaaggtttgacctgtaataagtcacatgtctgccctctgtttttctccataggggttctattcagcctctttggtgggataaacattccttattttcagtatatgtgaagaaagactcactccacagggctagggcctagatcagcactgtgagcagaagaaactctctaagaagaaaacgtgagagtgctctacatgatgaacaatatctagaaaatgagtgtggccaggcctggcacggtggctcatgcctgtaatcccagcactttgggaggccgaggcgggcggatcatgaggtcaggagatcaagaccatcctggccaacacagtgaaaccccgtctctactaaaaatacaaaaaattagccaggcgtggtggcaggcgcctgtagtcccagctactcgggaggctgaggcaggagaatggcgtgaacccgggaggtggagcttgcagtgatccgagattgcaccactgcactccagcctgggcaacagagcgagactccgtctcaaaaaaaaaaaaaaaaaaagagtgtggccagaggccagatggtttcccaagatatacactattcattaacaatgctctgttttcagaagtcttcttcataatcttaaaaatactccatttcttagtcattcaaagtcatgagccacttatgttattttataaagtcaaatatttttcttgtctcatgtcttagtgtatcaatagaagaagggaaattcagtctttatttctttcacatcctaatactagaactcttaccttttctcatgaaccatcctttactgtgatgcatatagttatcaagtacccatttatggctagtgttccattattggaatgctaagcatgtgggagttatatcctactgttcaagtcattgccaaggtctgattgcagaaattcaaaaaattgcaacctcaggcataaatggtaaggaatagttgctcattttattatctttcatggtctggaaggatgtgtgcttaatgacttgagttcagttcttctgggcttagtttcttgcccagtaattggctgattatctctacactggctcttatgtcctaggatgagaaccacaagagagaggacatgagggtaaatacaatggggaaaaagaaaacaaacagtggcagcagagaatgaagatgaggaggaaagaaaaaatgagaaataggaagagaatgagtttgttatgctcgtctggcaaacgtgtaatctgaataaatgatagagaatagtgtttataagagaatgctcttcagaggcaaatagactgtttaaatgccgttagatctgagtgtccttgatacattcttagcctgaaaactagaggaacatgggctggcaaaccaacactgacataaataaatggcaaggaatattaaaaaagaaaacaagttttgagagctacgggaacatataactttaggatattaattatttcagaaaaggcttttatgaagtagtgaatttttttcattctttcttgaatagttttatttttaaataagtttggattaccaaagagctgcagagatggtacagagtttctatatacacattccccagctttccttaatgctaccatcatatagaaccatggtaccttagtcaacctaaaaccttcacattggtacaatactctcagagaaactgcagactattcagatttccactgtttttccaagtattatcttttttagttccaggttctagtcacaaatctcacatttctttaagccatcatgtcccttagtctacttgggtctgcaatgattcctcagtctttatcttttatgaccttgtcactcatcaggatttttatcaaatgtccctcagtttgagtttgtgtgacttttgtgtgtgtgtgattagtctgagggtatgaatttttagggagattatatgctagataattttaagctgttttgtaaagaattagtcaaatcaatgcaaggacaccataaatttttctagcagaagaaacagcaacagcatagatggtgagtgggaaatgattatggtgtattttacctcttttaatccaacttaaatctctaagatagagctatctttcaaccaaaatgaccagctttcctaattttgtatatcacccatgtaaatggactagaacagaaatgatagattccccagttttccctcttttattttcttctctaccccataaatggttattaactgactctttgtgagatttgcaaaacagttctttagagtgggattgtcccaaccactctgagcaagggacaagaaaaccaagagaggctagaacagtaggtttcacaatagacgaaaactgccacctgagttcagacacagagatatactcctctcttctcatcctgtaaaactcaaaccttggttccccttgaggagagcccggcctttagctgccccaatgcacattgactgaactttaagctctatttcagccacttttgatggcacccatccctttctgtgcatgtctttgaatattgacgtgctccatccttgctggaatccaatttcctgtcaatcttggaatatataaatacttcttgctccatttttgaagccccctcaaagccccatcttccttcccacccattcctgacactgcctctgggtttctagaattcatcaaaattttccctagaattgttgatagccctcagcatgtatatgttaagctcttcctcaatacatgcatgaaatgttgccagaggaaataagaaaattgaataaataacatttgccacctaactggaacaatgaagaaaaggcagacagcgaccatccttgatcttctcactgggataacctttgaatgggacagtggaatagaaccattaatggagggaagatagctgtgaaatggtgtgaaagagagtgaattttggggaaagatggttacctgatgcagttcctcacatgctactatcaggacattcttttttcctctcatttgtagccagccatgagtgtggtcataccatgagtcatgagtcactgtgagaaagatgaggaaaagaggtgatgggtttgattgtctgcacagttgcagcccactgtatgcatgccataagtagttaaggagcacatgggtgaagtgaatggaaatccttttcccttttttctcatttgcaagagaaatagaattctgcccttactgcctagatacaaggcagcaggtgctgtgtgagatcgagtattgaagataagtttcacctctacctgtgaagtggattttcaattatgaagaaaattcagttagcaaatataggagctaaacttcattgttcttttttttttgaagtcaatgactttgttgtttctatcatgaatttagttgctttctcttatgccagaaaatgatgtaattaatggctgctaacacatgttttttgcttatcttctacccaccaagaaggtttttcctcacatttgcactgtattcagatgactgtggctggaggggtcatgtctcaagggatcctgttacttggatattgttgacatatagtgtggggcatctgacacatgcacaccagcatctccccttgatatttttagtcttcatatcaagagtaaacttgctgtttctctctgtaaatctggacagtaaaatagaagaactaatattcaggaatggtcagcttgctttcgggtcatacgtaatagaaacctatgctgaaacataaaaagtgaaacattcaagcagaaaagtgcagagattgagggaattctgtttgattccactgctccagctcattctaaggaggtcgagttgaattcttatgtaggattcattgaaaaagcatagtgttttcataattgcccttttgctcaaattatttacatttaatatttcttgcaactaaaggtttggcataattcagtaaaagctatggctgtggacatgatggtgctgaagtgcaaataatgaagtgatctgctcaattccatgtagatcatataccccaagaacttcaaataccaaagtggatgcttttaaaaatcttacaataaagatgccaagtatttttacatttttttttaatttttattttttgagacagaaccgtgctctgtcatccaggctggagtgcagtggcatgatcttggctcattgcaacctcactgcctctcaggttcaagctcttctcctgcctcagcctcccaagtagctgggattacatgtgcccaccaccatgcacggctaatttttttgtatttttagtaaagacggggtttcaccatgttagccaggctggtctttaactcctgacctcaagtgatccgcctgccttagcctcccaaattgctaggattacaggtgtgagccactgcacccagccagagatgctaagtatttttgtaacatggagcagctctgaacactttggtcaataagaaaattgaggctcgtagaagttaaaccattcttctgctgaaaatagctagtaaaaggttgaataatcgctgtttgaatgccgacattgggacctctgagaggagagcatttatgcaggaacatgctagatcatggactttgggagcatgttatgctgctatagcaaaaattgtactagttaaaaatatggttactccatgaattacaaggtaatctcacaagatgccagataattgcacaagctggcagaaagaaaaatgatgttttaaattttttatttttggcatgatagcctttaaaaataacttttatggaagtccaccctttaaaaacaatattttaaaaaattgaaatacaggttaaatttgaagctctttaatatagtgattaaagctgcacatgatgttgaccatgcagatattagtaccttaatgccttcaccacacctaactcccatcctggttctaagctgtaccagcttttctcacctcatgcagtttcctgagtttgtccttcagcttggttccttggtagcctagtctacaggtttttctttatatcttattttttttaagttaacaatggatcctggaggccactgtgcggtgatgtggcagtattccctattcctgttttaagttgggtactattccagaatattgtcagtggcaattttggttctttcttgtttgctatttcaagtaaagaacatttgaatagttttgtaaatccatctttttttgtgtttttgcttttgtacttcttctgtttgataagggggaattctgcatgaacatgtaactgcaggaacgtgagaatttgcaaacttttcctacatagatttatgtcattttccatctaaccaccaatatatgagcatgcctgtctatgagagtctcaccactagggtgattggaatgatctgaatgctagctgtggtaggcagcaggtcccccagtacacacacaccaaagatgtccatatcctaatcctcaaatctgtgaatgtgttacttttcatagcgcaagtgactttgaaggtgtgattaaagaatcttcagatggggagattatcttggcctatccagctggagacagtgtaatcacaagggtcattttaagaggcaggcataagtggcaaaagcagagaaagagatgtgatgacaagaaggatgtggccatgtgacgaagtgagggcagcctctagaagctagaaaaggcaagaggtagatcctctcctggagcctcaggaatggcaggtagctaggcccacagattaattttagctcataagacatattttggaattctgaactgcagaacatggcagtttaaacaaaactgcttagttttaactgctgtatttgtggtaattcatcacagcagagagaaactaatgaacctcctagtgtgataggtgagaaatggtatctcggtgtggtttgaattacacttctcttattttgagtatggtaagttgtatttttaaatggtcacagcacttagaataatttggagggacaaagcatgttcactgagattctgttgctaactggaggtaccagagatttaaccaacacctaggtttggagggcaaaatttgtttaaaccatgagacagtaagacctggacgtagaaactccaccattcttctaggaacccctattttgagtcatagtcaccatgtccttgaagaaaccattcaaaatattcttcagatgactctggatttttgaccatccttattgctctccagaaatagtaactagaaataacagcatctctgggatttctcactatgtaaataatcgtaaatgaaaaaggggatattgagaataaatatatccatttcctttgctccaggatttttgcaagtggataaaaaaatttaactcacattagagtctttggctgtagctcagccttctttaaatcattcatttaacaaaatgtattgagaacctactatgtgctagacatacagctataatggatcaatgaaagaagtctgcgtccgagtcctctgtacatttatggctaagggctgggctgtacaggcatggggcaagatcaccagaattttaccaaatagtagtgacttctaacagcttcttaacactcctgttatctagctgagtcattgaaagcagccagctacaaacagacacattccaggcagtggagaaagaggagaaaaatgccccctaacttctcatcagaaaaacaaaggcctaatgaaaatggaaagttgtctttaaagtgctgaagggggaaaaaaaaccttcatgctaaatatgcttcacgtatgaggatgaactcaaggtaatcttagaaacatgaaagctgtgagaatttattgctgtcagctctacacgacaacgaattctaaagtccttcagtctgtgaggaatcatagtgtatgtcaagggggaaggaaggaagaagccaagaaacagtaaaggagtaaatttaaaagacattttctttcctcttccaattaacttaaaagacagctgagtgtttaaagcaaaataaccccgtagacagtttttgcaatgtagataagagtgaaaattgtgagggaaatagtacaaagaaagatggtgggtaaatggaatcagttaataactccagattttctcctcgttcagcttgacaaagtcaccaaatcctccatctgcataactccatcagtaaacactgcatttaatctcctgggacaaccaatactttttctgtatttttctccctgcctcaccctctttacctatctatgatatttcttaaaatagatgttttcaccaactgcaccctgggatctgatactaagctaggctgtcagtaaatgatattgtcaccacagaaaccaagtatatgtctactctttgtcgtgcccaaatacaaatctgtaaattcccttaatatgtgggttggggtcatcttaatcatcacctttttctcaatcctgtttcagagcctgacacatgataggtgcataatacttaaatgtatgaaggaataaaaggcatgaatgcatacataagttaattaataatcagaagtgagtacatggaagaatcagtactgccagtttaaacacacagaaactgtgcttcaaagacgctgcactatttgccagtagacaaaatgtggaaccaaggttcaaactggaattttctgagataaagtcacaatcatattacagagcttggtcttgggctgtttgcttgggctatttgttttctttttcatttattcatcctatattttcttaaatctctacaacgttttaagcactttgccaaattagtataaaacagtaaaaatagtaagataataaacatggtcttcataatcatggatgtcacggtaaaatgaatcagcctgacagtaagtaagccagcaaatgaaacatagcacagtagtaatacaatgtgatagcataatactgtaataccttttttttttttttccttttcttgagatggagtctctatctgttgcctaggctggagtgcagtgccgtgatctcggctcactgcaacctctgcctcccaggttcaagcgattctcctgcctcaacctcccgggtagctgggattacaggcatgtgccaccatgccctgctaatttttgtatttttcatagagatggggtttcatcatgttggccaggctggtctcaaactcctgacctcaggtgatctgcccaccttggcctcccaaagtactgggattacaggtgtgagccatcacacctggcctataatatcttgataatactgctactaccacatcacctaagatgcttcaagggagtttcatacagttttgatggttttaatgccatatgatttaaactataatctatgatgagtacacattcacattttatagcacagggtcactcaatgctagaggttttatgtagagctcctgaaatgatgcatctgagtcctttcagctgggaaagacatggtctgaataggtaatatcatggttagaaaaacccaattgggtttcacatgtgagtaccaaacctatatttcctctcaaatagaggtactggcttataattgaggtgcttcccacatgggcttgtcaacattgggtgcctctgtgttgagggtgcagccaggatttataaaactgaagactgaatattctctggggcaataccaggcagattctcttgtatatgacattgtagcttagaacaagattttctaatctgcttactttactgaatcacattttaagtttgtttctaaaacaaagatattgagggcagtcagaaaagtagtccacatggacattcttttttttttttttttgagacggagtctcactctgttatgcaggctggagtgcagtggcgcaatctcggctcactgcaacctccgccttctgggttcaagcgattctcctgcctcagcccaccaagtagctgtgccaccacacccggctaatttttttgtatttttagtagaaatggggttttaccatgctagccaggatggtctcgatctcctgacctcgtgatctgcacacctcggcctcccaaagtgctgggattacaggcgtgagcaccatgcctggtggacattccattattaactcaccttggccttggaattaatgacttggagaagacctgaatggggaggggagagcagtagaagcatgagcctttctgactgtctacatgttcttgcccagttttaacttctagtcatggcgaatgatcgcaggagagcacagactggaccctgctacgatctctcttggagtggatcagactgatgatcaccaacaaccaactcattcccggataaggaagaagagagtgtcacctacttcagtgtggtttcaaccctacttctgcatcttaaagacactgtatggtttcagcagtagtgcccctgttcattagtccccctgatgttttcattcctcatctcatctttttcttagcagcattcaatgaatccttcattctagaaacactctatatctttggttttcatgagaccattctcaccttgttttgtcctgtgacttttttgaaaaaaacaaaaacaaaaaaccctttttttctttttaaattctggtaaaaaacacaatgaaaatttgctatcttaaccatgttgaaatgtgcagttagtaaagtacattcacattgtggtgcaagccatcactaccatccatcactagaacccttttcatcttgcagatctgaaactctacccattaaacgacttcccatcttcccatccccacagctcctagcaaccaacattctactttctctatcagtttgactactctaggtacctcatatgagtagaatcatacagcatttatccttctctgcctggcttatttcacttgtataatgtcctcaaggttcattcatgttgtagcatgcatcagaacttcctccccttttaaaggctggataatatttcatggtatgtttagatcacattctgtttatccattcatccatcagtgaacacttgtgctccttccaactttgggctgttgggtgtcctgccactgttgctcctagtgctcaatctcgtttattccctcctaatcaagtgtacaacgttggacactgtgcaggatgatgccacttcatcttggatgctaatctgccatgttgacttctgattaaccccaggcccaggaatgcctcaagatttctactttacttactgttgcttgtgtaagccaagacaaccttgatgttatcataaacatgtacttacctaagtcctgtcctttggcaaattatgggctatgagacacagcattcttgcctttccctgaggggtcaatttcagcgatcctacacattccttctgaagcacttatgctctttctatatggtatgtaagctctcggtctggggagtaacagtgcagagatctacctgtcttgttgccacatgtttctaaactttccaataaatcaccttctactgacaaactggatttgtcttccttattctttggtttcttggttcctttttggtatggatttgctttccctatgtggttctttcatgaaactgttggtgagctagccaggaggaattcaggagccaaagtatgggcaagggaaggaagcctcagttggggaagtcttggggcagccctctgtgtgtgtggggtgatattgcccgtttgctggatgcctgcagaccaccgcctgagtacggggatggcccagaacactacagggtctagagtgcttgtgagaagaaaaccacaccatgcactgaaggtccctgaaggtggcaacagaggggtggccgctattatgggttgcacatgtgaccccagaagtacagttagcaaccgagacaaaggtacagaagctagagaagtaattacagttagagaaggatatgaggatctccacatctgtgttagcatctaatttggtgcataagcttgaaactcaggaggtgcaggtggaaactgttgtctgccgcttttatgcagctgcgaggacaaaaactgcactggttgcaagtgtgagctgtccttgctagaccagaccaagatgctgagacctggaatccttgggaatcgacttgtgagtcagatgaagacagaggttatctcagagtaggaggattgtcctccccttttgagggcaggaggaaaacaaaacccaacagatacagctgtacaatagcaagcagtcttttcacagcaaagcttaactctgagagtacacctcagcagaactattggacacagcaagaactcttaaagcagctgccaagagacagcatagccacatggatggtggtgtggctatgcgagaggcccagtgaaggggacttcccaggtcagacactggcatggtggtctctggaggaggcacagagcaattcaggggagctgggtatgcagcaggccatctatgaccagcagttgcagttgtccccttgtaggacaagatgtatattatgtgcgggatgccgtagctggtcttggagaaactgaaaggggaagggataaggtccaactggttaccaagggaaaagaaaaggagatagcaagtctgttggacttgaaaaaggaggtctaaaagacccagttaggattaccagaaaacaaatgtggtacaatctgatctcagctgggataaaccaagaaacggaatcagcaacctcatgccatgttggtgggcatttgaaaggacttaactcccgcccaactgtttagaccttttcccagcatccggccagaaaaggaggatggaggagatgaaactatgtattaaaaaagaactccggtctctgctccagccttggactcctatccagcctacagactgcggggcggggggcgggggtgggagggggcggaaggggggcaaggttgcctctagggatgagcagtagagggtgactagaggctccatgtggagctcacaatatcagagttgaaaaacacatgcagaggacactagttgtagtggacacaggtgcagagtgcaccttagttcttggaagcccagagagacacgctggtaagtggacagctctagatggttactggggacaaacaatccaagtggaacaaactcctccccttcttggtattggatggtggagtttccctgcttactatactgtctttatctcacctattccagaaaacatgttggatatggacatcctttaaggatgcactttgcaaacgtccatgggggaattccaccaatgagtttgggtggtaaacactatttaaagagtggcagtgaaataggcacctgtactttttcctcccccatgatgtatcatcagtgtgaagtaacaaattattttcttggcagaataaaagaaatgacagccaccatagaggaactagccaaagttaatattagtcggccagcccagagtcccttcaggagttctgtgtgactgggaaaggaaatctgacagcaccgggcacgtgacagtagactacagggaattcaataaggtatttgctgacatataccctgttgtgcctaatatcatctaagtgatagaacaactatacaaactataggtacttatcatctgtattagatttagccaatgccttttttttttttcttgagaaaaggtcttgctctgtcactcaggctggagtgcagtagcaccatcatagctcactgcagccttgacctcctgggctcaagcgatccttcagctgcagcctcctgagtagctgggactactcaggaggtgtgccatcaaggtgcgccaccaagcccagctaacttttcttattttctgcagagatgagaaaataaagagaccaggctgatcttaaactcttgacctcaagtgatcctcccacctcagcctcctaaagtgctgagattacaggcacatactagatttgtctacctcattctttggtttcttgactcctgtgttggggaatgctttgcatatacagccctttcacaaaagagaccccacaaaacaattgatctcattctgtacatccagctaaaatcacatgtgtactagctgataaggcagaacaaaagtaattaagaggttttatttacttaaatatatagtgagtcaaagaaatgtggatgagcattgatttgaaggctatttatagatcatgaaggtaagcctggtgttcacccatgttgagggtgtatcttccccactcagtccactgatttataagccaatctcctctggtaataccctgaagacacagccagaagtaatgtttaccagttacatacatattccttaatccattcaagttaatacctgaaattaaccatcacatcaacccatgttctatggtacaaagcactgtggatgcattatctgtttacacaaggaaactataggctcaaacaggcttaatcagtttctaaactgaccctttaatttagtgggatatgttgaatcaaggacatagtgatgcatgctacaatctagatgcgccttgaagacattatgctaagtaaaaaaaaaaaaaaatcagacacaaaacaccacatattgtgatctcatttgtatgaaatgtcccgagtaggcaaatagataaacagaggaattagattggtggttgccaaggactggcgagagaagagaataaaaagtaatggctagtgggtaggatttctttagtcgttaaagtattctcaactattgtggtggctgttgcataactctgattataacaaggccactgaattttatactgtgaaaaataggctaggcgcggtggctcacgcctgtaatcccagcactttgcgaggccgagatgagcagaccacgaagtcaggagattgaggccaccatggctaacacagtgaaactctgtctctactaaaaatacaaaaaaattagctgggcgtggtggcacactcctgtagtcccagctacttaggaggctgaggcaggagaatggcttgaacccgggaggcagaggttgcagtgagccaagatcgtgccactgcactccagcctgggcgacagagcgcgactacatctcaaaaaataataataataataaagtaaaataaaataaataaaaaatagccgggcacagtggctcacacctgtaatcccagcactttgggaggccgaggcaggtggatcacgagatcaagagatagaccgtcctggccaacatggtgaaaccccatctctactaaaaatacaaaaattagccaggtgtggtggcaggtgcctgtagtcccagctactagggaggctgaggcaggagaattgcttaaactggggaggcggaggtttcagggagctgagattgtgccactgcactccagcctgggcgacagagggagactctgtctcaaaaaaaaaaaaaaaaaaaaaaaaaaaagaactagacttttatgctatgctatgaggactaagctctgatatttttatgttgcccaaattcctacctaaggggtctaaggagtcatgccctacaaactataaattctcatcagatgggttttgtctggccctacgcatcacgagttacttttcagtataactctggcataacattatgagaccaggaaaaaaatatttaaccccaaaatatatttccttgccataccttgaaactgccctgctaagtctcttttgggaaaaatccacatcctatagagaatctcctttcccccttgttttccttcatttctttccagatccaggagataatcaactaagagccaggtacccttttgggcttgataagaaacattttacaacctgctctctctctcaagtctgctgagaacttcctctgcacaataaaatttggcctccacaatcctttatgttatcctgaacattcctttctattgatcccaggtgttcagataaactcaaccaattgtcaaccagaaaatgtttaaatttacctatagcctggaagccaccactctgaattgtcctgcctttctgaacctaaacaatgtatttcctaaatgtatttgattgatgtctcatgcatccctaaaaatctatgaaaccaagctgtacctcaaccaccttgggcacatgttctcaagacttcctgagggcggtgtcacgggccatggtcactcatatttggctcagaataaatctcttaaaatattttacagagtttgactcttcgtcaacaataatctggcgcccaaacgtggggcctcagagaagactcaggacccctaaggagttgcctgaaaccggagctaaggtaccagcaggggcccattgaagtcccactgagttcaagcttctcctccggtggaactggtaagtcctcctgagccccagacctctccttgaccagacttttcttaggcttccctgagccctcttcttgagtaggcctggaccttggatttctgtgtccatccttgctgcacccagttttagcaagaatcctgttaagtaggtttagtgagaattcccttatccttgatcaggttcctcatcttccacccttaatgtctaagtccttggcctgcctttagcaggattctacccttaatacctaatcaagttcctgtttgtgatttcccacccattgacccccttactcttatagttggctacaaaaccaactgttgttgctatattggggagttgagttcactgtctctcccccattgcaattgtcttgaacagtattacttaccgtttacacacgtgtattcttttcctgtttccctcatttgcatgagaaatggaattctgcctttacagccttgatacagagcagtgggtgttgtgtgagatacagtattgaagatgagtctcacctctgtctgtgatgaaatagattgtgaattgtgaagagaatgcaggtagcaatgtaggagctaaacttaagtgtcctctaatttagagtcaatgactttgtcgtttctgctgtgaatctggctactctctgctatgccagaaaatgatgtacttaactgcagcaaacacgtatctttagtttatcctccactcacacaaacctttgggacagcacatgttatcaggagttttccccctcacatctgtactctcttcagatgaatgtggctggagggtcatgtcccgaggaatcttattacttagatattattgatttttgcagagtggggcatctgacgtatgcacaccagtgcctcttctcttgacatttttgctctttgtatcaacagtgaacttgtttctctctgtatatctggacaataaaattgaattcctcatactcagaaatggtcaggtcacattcaggtcatgtgggcacaaaataatagaaacttacactgagacctagaaaatgaaacattcaagcagaaaactgcagagatttagggacttctgtttgattccacaattgcagctattcctgaaaaaggtggagctcaattcctacattggattcattgaaaaagcacagtgttttctgtttcccttttgcttgaattccttgtcatgtctaatgttgtctgcaactcagggtttggaataatccaataggagctctgattgtggacatgatctaacgttctaataaccaagtgatgtgttcaacctgatatagataataaactccaagaccttcaaaaaccaaaaggaagacttttttttcatcttacactgaagataccacattatttttatgcatggaaggggtctcagcactatttcaatgaatacagtcccaatccccatttgaaaaataagaaaactgaggctcatagaagttatgtcatctttctgccgaaaaacagctattaaaaagttggatagtcactgtttgaatgcagacacttggagctctgaaaggagagcatttatgcaggaacatgcaagatcatggaccttggggccatgccatgctgctataccaaaattgaagtagttaaaaatatggatactccatgggttcataggggaacctcgcaagatgctggagacttggataagctgacaaaactagaacacgttttaaatttgggggcgggagcattacagcctttaaaatatcttttataaaaattccactcccaaaatctgagagtacttgtcagaaacagtatttttttaaactcggaatacaggttaaaatccaagctccttaattctgtatttaaggctgtccatgatatcgaccatgcagacgttagtagcttcatgtcttgaccacacctgactcccaaccctgactccaagctgtgccagctctgctctccctgtgcagtcttctgggttgtcctctgtcttggttcattggtagaatagtcacaaactttgttccataccttaatctttttaagttaacaggggatcctagaggccactctgcagtggtgtggcagtattccttattcttgttgtaagttgggtgctgttccaggatattgtcggtgggaattttggttcttttttgctattacaaataagaaacatttgaatagttttgtaaatctacctttttcgtggttttgcttgtatacttttttcactggagaagggggaattctgcatgaaaatgtaaattttaagtgttagaatgtgaggatttgcaaacttatcttacacagacttgtgtcattttccttctaaccgccaacatatgagcatacctgtctacccagggtctctccactagagtgatctgaataatttgaatgctagctgtgtggtaggaaggagcctccccaccgctctcaacaccaaagatgtccatgtcttaatctcaaaatctgttcatttgttacttttcatggcaaaaatgactttgccaatgtgattaaaggatcttcaaacagggagagcaccatggactattcaggtgaaggcactgtaatcacatgggtcattataggagggaggctgaagtgtaagaagcaaaggagacctgatgacaagagagatgcagccttgtgacaagaaatgagggcagcctgtagaacaggagtccccaacccctgggccgcagaccggtaccagtctgtgacctgttagaaactaggccacacagaaggagttgagcagcgagcaaacgtcaccgcctgagctctgcttcctgtgagatgagtggcagcatattctcaccggagcgtgaaccctattgtgaactgcgcatgtgagggatctaggttgaacgcttcttatgagaatctaactaatgcttgatgacctgaagtggaacagtttcaccttgaaaccattgccccatccatcttccagaaatcccatccctggtgccaaaatggttgaggaccactgctcttgaagccagcaaaggcaagaagtagattctctcctggagcctcaggaatggcaggcagctaggcccagacattaattttagctcataaagtatattttggaattctgaactacacaacataatttttttgttttgttttgctttaactgctatgtttatggtaatttgttacagcggagataaaaaaatgaatacacttctcagtatgataggtaagaaatggtatctcagtgtagtgtgaattacactcctcttattttgaatgtcataagttatcttttttaatgttcatagtacttagaataatttgtatggacaaagcacgttgactgagcttctgttgctaactggaggtatcggatatttaacaacacttagaagtttggatggcaacattcatttaaactgtgagacagtaatacctgttgaggtgcagaaactccactaccccttcaagaatcctttttttttttttgagacagagttttgctcttgctgcccaggctggagttcagtggcgtgatctcggctcaccacaacctccgcctcccagattcaagcgattctcccgcctcagcctcccatagctgggattacaggcatgagccaccacgcccggctaattttgtatttttagtagagacagggtttctccatgttggtcaggctggtctcgaactcccgacctcaggtgatcctcctgcctcagcctcccaaagtgctgggattacaggcgtgagccactgcacctggaagaatccattttttttttgagacagggtcttgctctgttgcctgggctggagtgcagtggtgtgactatggctcactgcagccttgaattcctgggctctagcaatcctcccacttcagccacctgagcagctgggactacaggcatgggccagcatgtccagctaatttttttgatttttagaagagacgaggtcttaccattttgcccaggccagtctcaaactcctgagctgaagcagtcctcccagctcgacctcccgaagtgctaggattacaggtgtgagccactgcacctggccaagaacccatatttagagtcagactcaccatatccttgaagaaaccattccaaatattatttaaatgactccgtatttttgaccatcctcattctccagaaataataaccaaaagtaactatatctctgggatttctcactaggtaaacaatcttaaatgaaaaagagagataataagaataaatgtatccattcttcttgcttcaagattcttgcaaaaggcaaaaaacatcaaactcccattaaagttttggctatagcttgtccttctttaattcattcatttaacaaaatgtattgataacccactatgtgcttgacatctacttagacactgtagaaggaacagaggacaagatacgggtcatttctgccctgaagaacattataatataaggcagggaagaggctaactaatgtttggacaatcaaatgatgttactacacttgggcaccactgtttaagaatccctgggctgtaaatcaggaactgtgagtttgttgggattctgccagagactctgactcagtgctactccaggaattttatctttcagacctctctttctttttgtaggaattcctactctatcccatataagcaaatctcagggactaagcaagtagatgttagcagtcaaccatatgtaagattcttttataaaattcaacatgatggcgtgaataaactcactatgctaccactggttgtgaaacctgaagagattaaacaaactttgcattttctcaaaacaaacaaaaaagagtttgttagaattaataaagctgaccccaagctaggataagttggatccagtgtcatacaaggccatttccaattctaaacaaataacgttgaccacatggagcctgtggggaaaactggtcaactctcacctgaagttccaaaagttgagaatatcatattctgtcccagaaattaatttgtaatccaaattcacctggtcaccaacactgttgttaaatttgatattcttcagaaaggagttaagcttaaaaatagtgcactgttacaggatggaaagagttctgaatttggaaagaagaaacttgaattagagtaatacctttgaaacttattagatgtgtggctttggaaaaagtcccttattgtttaaatcttcaactgtaaagttagttattcaattttatttttacaagaattatgtgagataatacctttgatggcccatgaacaaaaatgtggtatatataaagtaaaaattagataaagaaaacattatatatgtaatgtaatgataatttaatatatagtatgataatggaaataccccttacttccttggtgggatgaatgaggacagaagaatcaaaataatctcttgttattggttgaattttgtctgccccaaattttgcatgttgaagtcctaactcccagtacctcagaatgtgactgtatttggatataggatttttacagagttaattaagttgaaatgaggtcgttagggtgggtcctaatgcaatctgactagtctcaccatgtctccatgggttttctctgggtactccagattcctcccacatcccaaagatgtgcacagtaagttaactggtatgtctaagttgtcccagtctgagtgagtgtgggtgtgtagtaggctacacaatctaggtttgtgtaagtacactctatgatgtttgcacaacaaggttcttaggaaattgcctaagaacccatttctcagaatgtatctccatcctttagcgatgtagactgtatttccatactgtaaatagtccccttgtggtggatttcaatctaccaatatgacatcactgaatgtggagttagaaagaaaggtacagttcatggctctcagttcctacagctcttttaatttcctaaatgactgcagcaataaagtatcttttgttaaaatatctggccttttgttcctggttcctgaaaaagctccagaacagctccagagccataaaggtgaaagacagtatttcaaccacacatgagtttatgttaatgaggtgatttttggaaactctcaagataatcccaatatttggggggagtggtggctagttgccagaggaaccagccatgtgctcagaggactggaactcacagctccaccctctacttctgggaaaagagagagcctgaaaattaagttgatcgccagtggccaatgatttaatcaatcacatctacataatgaaaccttgaaaaccgaaaaggcctgagttcaagcggcttccaagaaggtagacaaaaacacatcctcgtgctgggagggtggtgcaccccaactccacgggcacagaagttcctgcactagggattctctcggaccttgccctacatgtctcttcatctggctatttgtatcctttaaaatatcttttataataaaccagtaaacataagtgtttccttgagttctgtgagctgctctagcaaactaatggaacccaaggagccggctgtgggagccccaatttatagcacatctctctgaaacacaggtacaacaatctggagtttggaattggcatgggaagtgggggacagtcttttgggactgagctgtctaacctgtaggatctgatgttttccaggtagcgtcagaattgaattggagtagcggtcacctggctggtgtctgctgcagacaggtttttttgacatgttaagacattataagagacaatagaaaaaatgtatacgatacaaccttctctgagttatatttctccatagccctttttactgttcatcagactgtttatctaactcatgaatttgtggcttgtctctctccgcttcaaagtaaattacataataagaggacagggatttttttttctctgctgtatccccctgaattgcttttccttatttgtctcaccttccaatactaattctacagttctcctagtcagggctagtcccctaaaacggggaccatttccattttgttaaggggctgaacgcggttcaagcctagcagattggttccaaaaacgtcgtgttattcactgcctctgatcagtgacattcccatttgcagctgaaagaggtattaattcgccagagtcacaacacggtcggggttcctcgtcgctgtcttattccaaaataagcttaacacagaaagataatgacactcccacggactggcacagaaggccgcgctccgaatgacatcgcgatcacagaggcacagacagcgtcacaaagccccacgcgtactcacaccgaaggctcagccgtcgcgcgtttccctcccaggccccaggaactagtaactagggacgcttctggtctctaggcgaggagagggggagagcgcaatctttgcgcctgcgcacactcctgctcttacccgccggaaccctgggccacgcccggctcgcgtaatcacgcactgcgcaggcaccgcccgctctgctctaaggtccctctcactccttcagcagcccgaggacaatcccctcaacactaggccacgccttgtctccgcccctctcgtccgacccctggagagaggctggcgcctgcgcgatggggggttccagcgtcgactcacggagtccttcggatgagagcgtctgggtgccagacgaggccgggggtttgttttgggtggtttgggagtccgagctcgagggctgggccaggaagggcaggcgaggcgggcggctccgacgcgggtcgcgaaggcccagccgcgtcctctgtccccaggacgactacatttcccagaggccagcggggcgcgcgtactcgagtctgcggggcggaggccgcggctcggggctgctgggcgttcggggcggcttggggcggcgggaccactggagtgagctgtgggagagatgggggtgtgcctgtgtgtaaaagatctgtcagagtgtgaggctccgtgagagggtgtggtttctgtgtgtgtgtgtgtgtgtgtgtgacagaccgagagtccagtgtgagaccagggtatgttcgtgtgtgacagagcgagacgggccagtgtgagagaccagtgagtgtgagagagatagggatgtgcctgcatttgaaagagagcgtgtgaagctcagtgagaggttgcgaggtgtgtgggtgtgtaagtgtgtaacagaccaggtgtccagagcgtgagaccaggatgtattcgtgtgagagagtgagacgggctggatggagtgtgagagaccagtgagtgtgagagatgggcgtgtgcctgtgtgtgaaaggccggtcggtcggtgggtgaggctcaatgagaggccggtgtgtgttcgagagagagaagaatcaccatgtatgcgagactagactgtgcaagaacagagtgtgagactgtggtatgttaatgtgtgaaagggagaccagtgagtgtgagaaatgggtgttttgggtgaaagacccgtcagtgtgtgaggccgtgttatgtgtgtctgacagactgagagagaccagagtgtgagaccagggtgtgttcgtgtgtgagagacaacatagcgtgagaccagtgagtgtgagagagatgagcacgtggctgtgtgtgaaagaccagtcattatgtgaggctccttgagaggctggtgtgtgtgtatgagagagagaaagagactaaactgtgagagtccaaagagtgagactaggttatgttgttatgagtttgtgagagagagggaggcgatcaaagtataggacaaagttatgtttcctggcttacgacttctaagatccttggaatctccaaagtattaagtgtctttttgcatgctaatgattggtgggctggcagcctgtaggttgatcacggtaagggatggtcacaagaacaatctaggcaggattagagggttgggattacctgccccatccctcaatctccagggaaaggaaagggagccacaggttaaactgatcatcagtggtcagtgatttaaccagtcatgcctacattatgaagcttccataaaaacccaaaaggactgggttcatcaaacttccagatagctgaacactggaggttcctgtaggatgagccccttcctatataaccttgtcctatgcatttcttcacctgcatcctttgtaatatcctttattactacaaacgtgtttccctaagttctgtgagctgccctagcaaattaattgaacgcaaggagggggtcataggaaccccgatttatagctagtcagaagcacaagtaaaacaacctggggtttgcaactggcattggaagtggggagcaattttgtagggctgagccctcaacctgtgggatcttatgctgtctccaggtagatagtgtcagaattgggttgccctagaggtcacccacctggtattcactgggttgccctagaggtcacccacctggtattcactgaagaacttattgcttgcctggtgtgtgtgtgtgtgtgtgtgtgtgtgtgtgtgtgtgtgtagatccccacacatctggtcttagaactgttttgtgttgtgtgagtggagtaggagaaacagtttgtttttcctctttgtcacctgagtgtgttatcagggactggattgtgagaatccagagtgtgagaccagggtatatcaatgtgtgagagaaatagatgtgcctgtgtgaaagatgaacaagtatgaggctccctggagtctgagaaagatcatgtgtgtgtctgagtaaaagcaagagactagactgagagttcagtgattgggagagactggggtatgttggtgtgagtgtgtgagagaccaatgggtatgtgagagactagagtatgtctctgtctggactggtaggttgtgagagggtgtatcacagtatgaaaaagattggagtgagagtgaccagtatgtattttgtgtgcatgagataaagcagttggaatatgagagatcagagtgtgtttgtgtatctgtgtgagacactggagcatttgagtaactgaggcctctttgaaagataccattgaatgtgtatgtatgagagaccatcatgtttatatgtgtgaaagagggagagaaagactagtgatgtggttgtgtgagagaccaaaatgggtgagaaagaaactatgtgaaccatggtgtgttatccaaaaggctttacaaatataacctctgtgaggttgtgaagcatgcatgtgtgagtgagacagagataagggacagtgagctgtgtgtgtgagagaagtaagattgggggtatgtgtgaaggtgttggtgaatcaccacgtgtgcttatattcatgtcctcaggcaatggaaatgtgactgtgtatatgtgcttgttttggggtgcttgtgattgtgtcctccgtgtgaccatgaaacctgtgttagtgtttgtatgtcaccctgtatacccataattgtggccctgtatgactgctgtgtatggagagactacttggaagattgataggattggattctttatgagtgtggctgtttggaattgtgtgttgccgggataggaaatgtggaatagaattcctgtccccagtccaagggtttcagtaagaagcaaagctggggtgactgaagctcctaactgaagcaggagacaccctcacttctgtgtgacaggagggtaattaaggggctgggacagaggtgagagtgaaagtggcagaattgagtgctaaaggttccatcgtttcagggtgaggaaagtgaaacagtgccggggggtgggtcagggatgcagtggtggggattgagtgaagaaggaggataaccctggcctctggtggcatttgggagtcagattttcctttttcttttgtttttttttttttcccaaaaaccccatccatctggcccagaaaggagccagattttcaaacagtagactttcaaagcatgaagcagagacccaagaagagaatgactccacctttacctgtaaaatggaggaaatgactattttataggattatttgaaaaataaagtgagataatctaatctatgcagagtacctaatgcatctgaatgggaaggtagctctttgaaaaagattaaatttaggacctcaagcatgaaaaaaaaaaaccgttatgagttttagcccttcagtggccataggttgctcatacccagttatgggatcaaccaaagctgggaagaagaagacagttttaggctagtgattctgggagtgcagcatctctggcctcatctctctctaacctttcccttccttcagccttgccctcccaagacactgttcttcaagagaaagaccagaagagaaggcaaaaatgaatgttgaagtagtaaaagtcatgccccaggttagtggatattttctttctcttcatgaaaggcagtcttgctgtttaggactttttgtaatgcttcttttcttttgaaaattccctgattaacagtccaggagcctagttcccacttctctcaggggccactgtctttaactctaattacctaatgagtgagtaatagcttagtataaaaagtcatggaggtccctctgagattcctcttcccaccttgtgtacattttaaatttagtgttgactcttgtgaaaagacttgatttatgttgtgtggaatatacatgtggatatgttagtactagtgagttgggctccaggttaaatgtgcatgcagtgcgtttcctatatatagaatgcattaggaattattcctctacctgaagttttctccaaatctctaattatgtccttaagataaattctttaaaagtttttctttacattttaagtatgaattaccaacctcattcgttcacctgaaaaatcttattctacttaatttttgcaaattttataaatttaaataggtgagaagttgacatggtacaaaatttacaaacaaatttcacccttaactcccagttattttaagaagttattctcaccatgtatctcattcagagctatgttatgcctttgcgtgtatacaaaaatactttcttcccttcaaagttaatgatttttcgtgtcttgttgatgaaatttttgtctacctttaggtcctatttttcttctaagatttgttttatccttcacagttaagtttctggtaagcttagacttgatttttgtggttttctatcatggtagggctgaaattacattaactttttatgttaaatttaatttacattagatttttacatttaatttacattacatttttacattacatgtataatttataataagtgaggcagagatttattttttcaagttggcacaatggcattaattgaattattcatctcattctcactaatttgaaatgccacctatatcatgcactaaattcctgtgtgtatttggttctgttgctgtactacactcagttttacttgaatttctgcttttaatcttttaatttttaaatattatattgcacatgtataagaaacaatgtataaaaaggaatccttaattctcccactgtgaaattcccctcctcacattttttctaagtggaaaatgtgttttcatgacatacatgagtgtcagatgtccataattaatgcttaattaatttatatgcttcatatggaaagttacgttaaattaattttgaaacactgcttttttttcttgtgctgtcagagttcatgagatattaaaaaacatttacatggattctgggcatctgtgtcttcctcagcattaaaaccattttgtgagttacctaacataattttccaaagatacagaccttttagtttgtgtgcctcatgttgtcattaaaattctacctgaagtcacaagcaccatacacaacagaattagtcccctccaatttgccctatagaagtaagttgggatctccacaatacaacttactgtctttagttttgatatttaacctcatactcctgaataatgttccatacactatttcttgattattttagttttagaaatgatccagtaacctactactatagatgataaagatgcagtccattaaccccaccacctgaaatgcacacacacatgcttatttgatagactgtaaacattattcactatttttgttttaagtcagtgttcagcgtagcttggtgtctttcatcaatttggaaatttttcaaccacaaatattctgaaactttcctctttttctaagatcacaattatatacataactgacactgttttatatgtcacttatgctttaattctctctttaattctctaatctcctgttaagcccataatggaattcttaacttctgttattgcatacttagttctagaatttctatttaattgttttatgtaattttctattttcttcctgaattcactacctttccttttagctccttaaaaatattatcataatattttggtatccttgttggataattccattatctggatctcttatgtgtttctattttgtgatgttttgaaaattatcttgttttttgtcttaaatgcctcattttgggtttagtgctagactttatatatttttaaaagatagtttgaagctttgatgtcctcctcttgagaaggtctacttaaaaaataaattttattttttagaatagttttagatttgtagaaaaattgcagagatagtgtagagaaatcttataccacaccaagcttcccctattaatattttacattagtgtggtacttttgttaaaattaatgaaccaatattgatatgttattagtaactaaagtccgtgcttagtttagattttctttcattgttttaactttttaattttttttttttttttttttttgagacagagtttcactctgtcacccaggctggagtgcagtggcaggatcatagcacactataacctgcctctccagttcaagcaattctcgtgcctcggccactcgagtagctgggattataggcatgcaccaccatgcacagccaatttttgtatttttggtagaggtggggttttgccatgttgtccttgccatgctatgtaggctggtcttgagctcctggcctcaagtgatctaccggccttggcctcccaaagtgctgggattataagtgtaagccactgcacccggccaggctttcttaggttttatctaatgttttttttctgtgccaggattctatctaggaaattacattacatttaatagtcatatttcctaagactcctcttagctgtgatagtttttcatactttgcttatcgatgaccttgtcagctttgaggaatactcagttattttgtagaatgtctcaaatctgatgctttttcatgattagactagggtactgtgttttggggaggaagactgcagaggtaaagttcctttttcatcacatcaaatcaggggtgcacactgtaaacatgatttattactgttgatgttaatagatgttaacttaattaactttgaggtagtgtttgtcaggtttctctataataaggttactcttttttccctcacttttccatactgtactgtttgtaaggaagtcactatgcacaacctacactccagaagtgggaaattatgttctacctccttaagggcaaacataaatcatttgaaagatcttctaaatgagatatttgcctattttcctcatttatttatttagtcttaatttagtcacttactcagtattaatcctcctggaaatttcataaattatctgataccttgcaataaatggttgtgtccttaaaaagaaaaaagaattacaagctcttcagatgctatccattgggatttacttcattggttatagcattatcagttaaaaaaaatcactacatatacatgcatacatatatgtaaagttattctatagatattggtaaaattctggtagtatatatactagattactaaccataagtaccaggatcaaaagcagttttttctgtgggaacagccaaagctcctctgtccttaatagtcagcaaaattatcctaaatattggaaagaatgtgaacaccttttgcttgcattgaggaatacatctcattttataagaatatgtgaaatgatggttcttagttctcaactcactagaaggtgaaaactagaattcagtaaaactgtgagtacacagagaaatgtaaacaattttgtaattcttttatatgaaaaatatattaaacattttcctaaaggtatgtatatcttctaaagtcccgtacattgaatatctgtttaaaatgtgcttttaaacactaatcttcagaacaaagacatgatacagagattactgtttaaagcgaattaaaatgtgctcataaccttgtctttagttatatttttgataactttgcaaatcaggcactaagattaagaagatattcattttcaacggaagtaaatctgaaggtgaaaaatgcccacaataacttttaaaatttcttacaagctgctggtgattataactggtcattaatttttctctaagaatatttaaaagttataacttcaatttcattttgttctgcaactgtgggttctaccaaccgtgggtggaaaacacagtattcactgatgcagacctaagaaaattgcattcttaaacatgtttttattatttaagaaaaaaaaatcagctacattagttcaatgcctttctccagcccctgccaataaaacttggatcccatggagtatcatttgaaaaatatcagtttagatattccttttatgcttttgaagattcaacacaggtgtgtgttctcccttgaagccgtcttcactgccttgtagttatgcacccatatttccctatgttcggaatcgattggccccattgtacccaatgcagttaaacacttccataagtactgttttggcttggatcttcctatttatgttttttctcttctatgagttatttctcacctaaagtagagacactttggatcaactcagagttatctttggacacgagcattggttggttaagaatatatttgtcacttcaggacttagtgacattcaaggatgtggcaatagatttttcccaggaagaatggcaatggatgaaccctgctcagaagcgtttatacaggagtatgatgttggagaactatcagagcctggtatcacttggtgaggatcttttccctcctgcataatctacctttaaggaacttttttgtctatatattattaaatttgcttttattatatgtaggtcagaatggaatttgggaatggaatctgagaaacagaggatattgagggactgaagaaaacttgagatttagagttagtgaatttggagaatatcaaatattccatgcatacacccttaaggcaattgggaacacaagacacaatgtgaatctcaccagtctcctcagtttccttgttctctctctcctacagaattactatcaccactagacaacaacaaggttcacaaagaatatatagctagattactataaattcagaatatcacttttaaaatctgtatctttgtattaagtaacaaactgaagacacaaactgaaaatggcttcagatcacttactgttagggaaattcctatggacctttcttctaagcactggggccaccccattggctagattagctttctgttctccagaagcccttttgattatgcttgtggttcattgagcttcttgaaactaaatttatatcttaaaccaaatttgggagatttttagccattatttcttcaaatctttttttctgttcttttctgttttggacttcagttacacctatgttagattgtttgatattgtgccctaggtaactaaggattgtttcacttttaaaaatctttgttctgttttaattttaatttttctctcgctctctttttttttttttttttgagacagtcttgctctgttgcccaggctggagggcagtggcgcaatcttggcccaccacctcccaggttcaagcaattctcctgccttagcctcccaagtagctggattacaggcacccaccaccacacccagctaattttttttttttttttttttttgaaacggagtctcgctctgtcgcccaggctggagtgcagtggcaccatctcggctcactgcaagctccgcctcctgggttcacgccattctcctgcctcagcctcctgagtagctgggactacaggtgcctgccaccacacctggctaatttttttgtatttttttagtagagatggggtttcaccatgttagccaggatggtcttgatctcctgacctcgtgatctgcccgcctcagcctcccaaagtgctgggattacaggtgtgagctactgtgcctgacctaatttttgtatttttaatagagacagggtttcactatgttgctcaggttggtcttgaactcctgacctcaggtgatctgcctacctcagcatcccaaagtgctgggattacaggcgtaagccactgtgcccagctcagattggataatttctgttgattcatagtcaaattccctgactctatccttaccctcaatgtttggttaggtgcatctagtgaatttttaagtttcagatgttatatttgttaaattatataatatttatttggttcttcttgtagtttcgtttctgagatatcctgtgtgtacatttatttcaagcatatttgcctttatattcttaagtattgatataataatagctgtttttaaatcatgtgctatttcttcttcgttattgcagtgtgagcgtctattgcttgctttttctaatgggcatgattcactttttccttttcttatgtcaagtaattttgaattttatcatgtatacttaaataaaacattgtagagcctctggattctgtcatattcccctaaagagtattgatttttttctaaagcaggcaattatctcaaaacttcaaactgtttctagggaccttttaaaatacctcatttactactgtgtgataatattcagaaaatgttgggctaaatttctgccctcaagcccctcataaaatagttcacagagttaactgttagcagtcttactaggctattccagagttttatgtagtctgtccttcagatgtgctttatctcttatctagtattcctactatatcattccaccagaattaaggtactggcttttagttctgaaataacccaaaacatgaccaattttcatgtcttttttttatatgtaggtctttgcatttctaagccatatgtgatctccttattggagcaagggagagagccttgggagatgacgagtgagatgacaagaagcccattctcaggtgagtgtggaagaaccagagaggggaatctttttgacataatggctcagccatttttagaggtgataccttctcacttatgcatctcagaaactcttcataagccttacaggcctggagagaaaactgaaactttatgcttcacatgggcccctcaaatatcttctcttccacttgactgtcttctctctaagaactaatattctgtagagattagagaatcttaaatctctaagatttttgttttgcaaaaatcattatccagctccttaccatcccgtctttcgctttgccatacagacttatataaacttctatgtttcttaaatcttttcttaactcttgaattaggtactgcttacaaattataatgtaccctgctgctctttcattcctttcctgtagcagataggaaaaatctaaaccctgttagcctcttcctgatcagctccttcctacttctataacctcattctttattactttttagctttttcattatactttagtccagagtttgctaaattatgtgagatacccagggtatgtttcaagtgagttacaggtataccaagctactgagtctctcaagagccttgggagactagatggctccagaggtaattccaaatctgattgcctctgagtcacaggcagtatcattcttttgcctgctccacctgtgttttacaaatgtcatattagggtcaacttttctgaactcaccaagctttttactgactcaggcatatgcacttcctgtttcctctacccagagtgttcctctcctggggtctgtctatcctgaatatcaaatcagagctaaaaaatcatctcatcagaggccttccctaaccaccttatgtgatgaacatttccccatcccaacccaataactgtccaccaagccactgtttattttctttctaacactcaggaaagcctacaattaacttgcttatgtttaatgcttatattctgcctctcccactgaaattaaagttccaaaagaaaagggcatatcaatatatgcccttacaattatggcttaaagcattctcctttcccttctgtaacagtgtttgatcttttggaataatttggatcctaaatttcccgtgtcctccaaatacaatagtccccctattcaaggttttgccttctgcagtttgttacccacagtccaccactgtccaaaaatattaaatggaaaattccagaagtaaacaatttatatgttttaaattgtgcaccattctgagttgtatgacgaagtcttgcacctttctgttctgtcctgcccagatcatgaatcatccctttgtctagcacatccatgctgtatgccctacctgccttttagtctcttagtctcgtctagcttttcagatctgttgtgtgtagtgaatatagggttcagtatcattccgggtttctggcgtccactgggtcttgaaatgtgtccactgtggataaggagggatgactatacccacacatcagaagggaaatagaccctgcttggatgtactttatactttggttttgtatgaagatgccatctgcctcaaatagagaaacagaaaagaactttcctgataattggccctgtgaagaacaagtggaagaagggaaaaggggaaaaggaagaagctataagtctggtgggatgctgagtcaatgtgtagatataagtattattgtatgcataagatatcttagtgtctgttaaaaaaggccaggaaatgaggaacaaccatggctctctgtaggaaattggagttgaagacaatcttcatgtgacaaaaaagtaaaatgtgagaaaacagtagatgatggactcagcattctgtgtctttttctagtattgttctcttcagtctgtctacgtaggaaaaattataggtgattagttcattaaccccacattgcctcaattcttgaagcatgggtgccctggtctgaatgtttgtgtgcccctgaaattcatgttgaaatcatcttctctagagtgctggtggtaggtggggaccttgggaggtgattaggtcatgagggctcatgagtgggattattacctttataaaaggcccaaaggagcttccttgccccttccactgtgtgaggaaacaggaagaaggcaccatctgtgagaaagccagcccatgccatgggccttgatcttggatttcccagtctgcagatctgtgagaaataaattagccatggccggctaattttttataagtgtattagtctgtttagttataagtgttgtttgtaagtgtattagtctgttctcaagctgctaataaagacatacctgagactgggtagtttataaaggaaagaggtttaattgacttttagtgccacatggctggggagccctgacagtcatggcagaaagcaaaggaggagcaaagtcacttcttacatggtggcagtcaggagagagcttgtgcagggggactcccatttacaaaaccatcagatctcgtgagacttattcactgccagtgaacagtatgggggaaactgcccccatgattgaattatctccacctggccccacccttgacatgtgggtattactacaattcaagatgagatttgtgtggggacacagccaaaccacatcaataagctacccactatgtggtacagtcatgggccacataaacaatgtatctatccattatggactgcatataagacagtcacacaagattatgatggaactgccctatacaggtataactttaaaaaaatctcttctggctaggcgtggtggctcatgcccataatcccagcactttgggaggccgaggcaggcagatcacgaggtcaggagattgagaccatcctggctaacatggtgaaaccccgtctctgttaaaaatacaaaaaaattagctgggcatggtggcatgtgcctgtagtcccagctactcgagaggctgaggcaggagaatggcatgaacccgggaggcagaacttgcagtgagccgagattgcgccactgcactccagcccgggcaacagagcaagactctgtctcaaaaaaaaaaaaaaaaaaaaactcttctattgctgggcatggtagctcacacctataatcgcagcactttgagaggctgaggtgggaggattggttcagcaggagttccagaccagcctgggcaacagcaagacctcatccctactaaaaataaaaaattagctgggcatggtggcatgcacttggtactcccagctactcaggaagctaaggcagaaggatcacttgagcccaggagtttgaggatgcagtgagccatgatcatgccattgtactccagcctgatgacagaggggaccctgtctcaaaaaatatatataaaatgtcctcatagcatattttactgtaccttctttatgtttgtatatgtttagatacaaaaataccattgtgcttcagttgcctatagtattcagtggtaacatgttgtgcaggcttgtagaccaggagcagtaggccatatagcctaagtgtgcagcaggctacaccatccatcaaggtttgtataagtacgctctgtaattgcccatccgtaatgatgcatttctcagagcatttctccatcattaagtgacacaagactattttgttatagcaacccaagttattcaagacactggatattcctgataccatgaagacctggactacaaagcatgttaatacctcaaaacctttcttgactgctctagtggatttgatctctcccatctctgaacttttataacaatttaatctttatctcacacttgattatgttttgtattatcttctcaaaactttttttgttggtcttgtcttcctaaattactttctaaacttttcaagaacaattccttcattactttgatatcacaaatgcttagtgcataatgtataattgcttaggaaatattggattagtcgatgatttgctatggatgacatagaaaaggaaagcccttcctttgccttttcttgaaaccaccttttccctcaggttttctctcagtatcatctcttcaatacaaatttctttatattttactgataactttgtatatatgcccagatttcttctatctatggtaagtgatgtagcaatatattttttctttttttctttttttttttttgagatggagtttcattcttgtcacccaggctggagtgcaatggcacagtcttggctcactgcaacctatgcctcctgggttcaagcaattttcctgctttagcctcccaggtagctgggattacaggcaggtgacaccatgccccgctaattttgtgtttttagtagagacagggttacaccacattggccaggctggtctctaacttctgacctcaggtgacatgcccgccttggcctcccaaagtgctgggattacaggcatgagccattgcacctggccgatgttgcaataatttttaaagcacatttattccttctgtaaacttatattctaggtcaggagttaagaaagttactcgtggtagtaaataagaatgtgattaatagtagttatatcaacctacatatcattataaaattcatttcttcaaaaggggaaatggtaaaaccctgttaagcagtggcttaaggtgctgggtgcagtggctcacacctgtaatcctagctactcaagagaaggtgggaagattgcttaagcccaggagttagtgagccatgatcatgccactgcactccagcccggacaactgagtgaaaccctcttttttttttttttttataaaaaggtggtctaagaggtgataattttaccaggctgttgaaagtaagatgaaagggaaaatctcttaatatgcagattaaagttcagggaactctgagaattggagagtttgctgtattgaaacatgtagatgatttcataggaacaccattttcacattatgaaaagataaccataggatttcacctaaatcctaagataatcacaagccatagggtatatggttactggagatctccagagacttttcagcagcagtagtgatacgatattggtatttaaacaaagttaacataactgtatatgaaaaccaattacaagtggaagagagtagatgaagagagcttaatttatagtctgttaggtcaatacaggcatgaaatattaccattgcagactacttctctaggatttcatcctacattgaggtttttgtttttgttttttgtttttgtttttgttttgagacagggtcttgctctgttgcctaagctggagtgcagtagggcaatcatggctcactgcagtctcaacctcctgggctcaagtgatcctctgacctcagcctcctgagtaactgggaatataggcatgtaccaccatgcttgactaatttttgtgttttttgcagagatggtgttttgccatgttgcccaggctggtcttgaactcctgggctcaagcaatccacctcagcctcctaaagtgctgggattataggcctaaaccactacacctagcccatttcgctttcttagtcacctctcccatgttccttcatgagctgtctttcttggggtctccctgaatgttttccagttgacatgcctgtacataacaggttttgtgagatttattaaatatttttaaattacctttttcacaatgtctcctttgttgtagcccatgataaagggaacattcacttttttttaatatctttcagattgggaatctatatatgtgacacaggaattacctctgaagcagttcatgtatgatgatgcatgcatggagggaattactagctatggacttgagtgttccacttttgaagaaaattggaaatgggaagacctttttgagaagcagatgggaagtcatgagatgtttagcaagaaagaaataatcactcataaagaaaccatcactaaggaaacagaattcaaatatactaaatttgggaaatgtatccatctggaaaacatagaagagagtatttataatcacacatcagataaaaaaagcttctccaaaaattctatggtaataaaacacaagaaagtctatgtaggaaagaagctttttaaatgtaatgaatgtgacaaaaccttcacccatagctcatcccttactgttcattttagaattcatactggtgaaaaaccatatgcatgtgaggaatgtggaaaagccttcaagcaaaggcaacaccttgctcaacatcacagaacacatactggagagaaactctttgaatgtaaagaatgtaggaaagccttcaaacaaagtgaacaccttattcagcatcaaagaattcatactggagaaaaaccatataaatgtaaggaatgcagaaaagccttcagacagcctgcacaccttgctcagcatcagagaattcatactggagagaaaccctatgaatgtaaagaatgtggcaaagccttcagtgatggctcgtcttttgctcgacatcagagatgtcacactggcaaaagaccctatgaatgtattgagtgtgggaaggcttttaggtataacacatcttttattcgtcactggaggagttatcatactggagagaagccttttaattgcattgattgtgggaaagccttcagtgttcacataggacttattctgcataggagaattcatacaggagagaaaccttacaaatgtggtgtgtgtggaaaaaccttcagctcgggttcatcccgtactgtacatcagagaattcatacaggagagaaaccttatgaatgtgatatatgtgggaaagattttagccatcatgcatcactcactcagcatcaaagagtacattctggagagaaaccgtatgaatgcaaggaatgtgggaaagcctttaggcagaatgtacaccttgttagtcatttgagaattcatactggtgaaaaaccctatgaatgtaaagaatgtggaaaagcttttagaatcagttcacagctggctactcatcagagaattcatactggagagaagccttatgaatgtattgaatgtggaaatgctttcaaacagagatcacaccttgcccaacatcagaaaactcatacaggagagaaaccttatgagtgtaatgaatgcgggaaagccttcagccaaacttccaatcttactcaacatcaaagaattcatactggagagaaaccctataaatgtactgaatgtggaaaggcttttagtgatagctcatcctgtgctcagcatcaaagactccacactggccaaaggccctatcagtgttttgaatgtgggaaggcgttcagaagaaagttatccttaatttgtcatcaaagaagtcatactggagaagaaccttaagaatgtagtgcatgtggccaagcctttagttatcaccaatcccctactgttaatcagagatgtcccactggataaaaaacatataaatgtaagaaatgtagaaaaaccttcagccaggaggctggcaagatggccgaataggaacagctctgatctgcagttcccagtgagatcaacgcagaaggtgggtgctttctgtatttccagctgaggtacctggctcatctcattgggactggttagacagtgggtgcagcccacggagggtgagctgaagcagggtggggcgtaacctcacctgggaagtgcaaggagtcggggatctccctcccctagccaagggaagccatgagggactgtgccatgaggaatggtgcactccggcacagatactacgcttttcccatggtcttcgcaacccacagaccaggagatcccccttgggtgcctatgccaccaaggccctgggtttcaagcacaaaactgggcggccattcgggcagacaccgagctagctgtaggagtttttttgatagcccagtggcacctggaatgccagtgaaacagaaccgcttactcccttgttaagggggctgaagccggggagccaagtggttcccatgcccactgagcccagcaagctaagatccactggcttggaattctccctgccagcacagcagtctgaagtcaacctgggatgatcaagcttggtggggggaggggcgccaaccattaccaaagcttgaataggtggttttcccctcacagcgtaaacaaagccatggggaagttccagctgagcagagccctccacagctcagcaaagcctctgtagccagactgcctctctagattcctcctctctgggcagcgcatctttgaaaaaagtgcagataaaaccctcatctccctgggacaaagcacgtgggggaaaggggtggctgtgggcacagcttcagcagacttaaacattcctgcctgccagctctgaagagagcagcagttcttccagcacagcgcttgagctctgctaagggacagactgcctcctcaagtgggtccctgacccccatgcctcctgacggggagacacctcccagcaggggtccacagacacctcatacaggagagctctggctggcatctggtgggtgcccctctgggacaaagcttccagaggaaggaacaggcagcaatctttgctgttctgcagcctccaccggtgatacccaggcagatatggtctggagtggacctccagcaaactccagcagacctgcagccgaggggcctcactgttagaaggaaaactaacaggaatataatcaacatcaacaaaggacatccacacagaaaccccatctgaaggttaccagcatcaaagaccaaaggtagataaattcacgaagatgaggagaaaccagtgcaaaaagcctgaaaattccaaaaaccagaatgcctcttctcctccaaaggatcacaactccttgccggcaagggaacaaaactggatagagaatgagtttgacaaattgacagaagtaggcttcagaaggtgggaaataacaaactcctctgagctaaaggagcatgttctaacccaatgcaaggaagctaagaaccttgaaaaaaggttagaggaattgctaactagaataaccagtttagagaagaacataaatgacctgatggagctgaaaaacacagcatgagaacttcgtgaagcatacagaagaaaaaccttcagccagattgaatgctttacagggaagaattcatactgcagagcggtcttaacaatgtaaagaatgtgcaaatgtcctcagacaagatgcacaccttgctcattagtgagttcatttcaggcagccagctcttcctcacccactacatcaccaagtcctgtggatatatctgctaaatatttttggaatttatccacttcttttggttccccagtccaaaacacagtcatttcacctggactatttcaatcattacacaggtgtccaaccttttgtcttccctgggccacattggaagaagaaaaattgtcttgtgccacacatacaatacactaacattaacaatagctgatgagctaagaaaaaaaaaaagtctgtgcatagttttagtgatacaccacctccgataagcaaaaaagtcctcacattcaatgggttgcatacccatgaattctaaaacttcatcctcttttgtccctttcgagttaacattacagccacagtgacctttcaaaaatgcaaattaagttactcttaaaactctagttaaaatacttgatgtacataaagtgcttagcaaaatgaccaactcatactaagtgcttagtaaatgttagataagtattctccagaattgatgtaaattatttttaaacagtgcattcttgaaagcagtatggcagtcataaaaattttggaaccaaaacagtatctttttttaagctaaaaaaaaagttttaaatggtgtctttctatgttgcccagggtggtctcaaactcctgtgctcaagtgaccctcccacctcattctcaagtggctgcaattacaggcaaccagcctgacttaaaacagtatcttaaggtagatggtgattagcacatgtagtatgcttaacatttaatattataataagacatcacagcggctgtctcatgattaaggctgtgttcccttgttggtgaggaaattaattatgacttgataaatagaacatgttttaagaagtggctatatagctctggataaaacgaacaaaagaattagaattcctgcggggaatatatacaagactttatttagtcaagtaaaaaaaaatcactaatgtttaactgaagaaagagaaattgaataatatagttctatttcaacatgtgggttcacagatttattctaaccttccaagtaaagttgttccactagtaaagttgttctggagtatattttttttaaaaaaaacacttaaaatgttccacttctttcatgaggctaagtcaactctgatatcaaaccaaggggaaagaaatgaaattataggtgagtttacttagttatatacaaaaggaaattattagcctctgctgatggagaacagaggctgtgaataaatggagatccataacatgatcctacatgaatgtttcaatattgtaatcctgtaagttacttttacattgacagttctgaaattcatgttgagtgttaattaggcaggaatcagaagggaggttttgtagaaggtcgtatccatgggttttttatatttgaaaagtgttttcgatgtatcattgggggagattaaatgtctttgacagttgtccaactagaaataaagtcagcatcccatttgactccttacacagaagttcattctatactcattacagatgtaagaggttaagatggtagaggagaatgtagagtatttctgtgcctttaggttcaggaggtctttgataagcaggacaaggtccagaagccatgaagagagaatgacaggactgtgtagaagatttaaacctttttcatggcgtaagatactgtatgcaaagttaaaaggcatatgacaggctgagagatatcttaaacatacattagaaaggatatagcccttgaaaaagggctgttggaaagcagcaaggataaggtgcacagtcttgcagagcatgtcaacaaaatttattggatgaagaaattaaaatggttaaatagaagaagttctcaacctcactaatgatcagataagtgcagattgtaaaagtcctcatccccaccaacacaaaccagcagaaattttatgtgaatgtgaagtttggataatatccagtattgtcgcaggtgtgagaaaccgtattttcaaatattgagagggtaaattagaggaaagccattttagagggcaatgtggtgttacctgtcagcattttgaatataattaccctttgccacaattctacacctagtcagttatgttctcaaaaagcacaagtgcagaaatatagatgcataagcaaatgtgttgcagaattgtgaaaaatttggaaaaaatgtttagtgctattaaagttatgggttacttaagttacagaaaatcagtttagtagatcactgtgtagttacggaaaatgagatggatctctactcaaagatgtcttgcagtttatgaactgagatgtaacttcatgactaacatgatgacatcgttattaactacataaactttataaagcttaaaaaatgcattcatagtatcttatttgttgtttttgtttacaatacaaatagaaaccatgcacacagatacaagaactccttccctgttgtttgtttttgttttgttttgtttttggtagcgggcggggtgagctgctctcatgttattccatgagtttttttatgtgttgcttgttgtgcatggttcattttttgtttttattttttgagacggagtctcgctctgtcaccaggctggagtgcagtggtgcgatctcggctcactgcaacctccacctcccgggttcaagcgattctcctgcctcaccctcctgagtagctgggactacaggatagtctcgatctcttgactcatgatctgcccaccttggcctcccaaagtgctgggattacaggcataagccaccgcttccagcctgtatatggttcatttaaatcaaatgagatactccttgagacatgggggaagttgaatgtgagttatcctttggccaagacttaaagatggtatatgagtttgtctgctgtgctccctagacctgacccgattcatgcttctgccaggttgtaaacctgttttgtcctgctgaattggcagagcagtcccaaaagaactgtaactaaggtatgcacatactgaagaaagggatatagtatttctgggagagccctaaggaaggtagacttctgttgcagtcattctgaagaattatgggtggtgattcttgcacaagcccagctcatacatctaggctagatgatgcttagatatctttatcagtgcctggggatgttttaaggcctctggttgggtttaagcctgctgggagaaacctcggctaaaaacagttgaaaagcttttcctgatcctgtgcttgagagcagcattttacctctagggagtgctttacttgccatccataggatgctaggcacatttcaaagaaggactgttttaggaaagtggtttcttatctcttaaatgtattgaggctcattttatggcctatcatatggtctatcttggagaaagtcccatgcgctgttgaatacaatgtgtattctgtggttgttggatgaaatgttctgtatatatctgttaagtccatttgttccaaggtatagtttaattccattgtttctttgttgactttctttttttaaaagtttgagatggagtttcactcttgtcacccaagctggagtacaatggcatgatctcagctcactgcaacctctgcctcccaggttcaagtgattcttctgcctcaccctcccgaatagctgggattacaggtgcctgccaccacacccagctaatttttgtacttttattagagacagggtttcaccatgttggccaggctggtcttgaactcctcacctcaggtgatctgcctgcctcagcctacccaagtgctaggattacaggcatgagccactgtgccagacctctttgttggctttctgtcttgatgacctatctagtactgtcaatggagtattgaagtcccccactattattgtgttgatctctatctcatttcttaggtctattggtaattgttttgcaaatttgggagctccagtgttaggtgcatatatgtttaggattgtgatattttcctgctggacaaggccttttaccattatataatatccctctgtctcttttaactgctgttgctttaaaatttggtttgtctgatataagagtagttacccctgcttctttttggtgtccatttgcatgaaatgcctttttccaccctttaagtttatgtgaagtccttatgggttaggtgagtgtcataaaggcagcagatagctggttagtgagttcttatccattctacagttctgtgtcttttaagtggagcatttaagccatttacattcaatgttagtattgagatgtgaggtaccagtgcattcatcatgctctttgttgcctgtgtaccttggtttttttttttttggctttttaactttttttttttgtattataggtcctgtgtgatttatgctttaaagaggttctgttttgatatgtttccaggatttgtttcaagatttagagctccttttagcagttcttatagtggtgccttggtagtggtgaattctctcagcatttgtttgtctgcaaaagactgtatctttccttcatatataatgcttagtttcactagatacaaaattcttgggtgataattgttttgtttgaggaggctgaagatagggactcaatcccttctagcttgtagggtttctgctgagaaatctgctgttaatctgataggttttcctttataggttgcttgttggcttctgtatcacagatcttaacattatttcctttgtcttaactttagataacctgatgacaatgtgcctagtgatgatctttttgcagttaatttcccaggtattctttgtgcttcttgtatttggatgtctagatctttagcaaggctagggatgttttccttgattatttccccaaatatattttccaaacttttagatttcttttcttcctcagaaacactgattattcttgggtttggtcatgtaacataatccctgactgcttggaggctttgttcatattttcttattcctttttctgtctttgttggattgggttaatttaagaccttgtcttcaagctctgaatttcttctacttgttcaattctactgctgagactttccagagcattttgcatttctataagtgtccaatgtttcttgcatttttaattttttttctttatgctatctatttccttgaatatttttcccctcaattcttgtatcactttttggatttccttgcattgggcttcacctttctctggtgcctccctgattagcttaataactaacctttttcaggtaaatcagggatttcttcttggtttggatccattgctggtgaactagtgtgattttggggggtgttaaagagccttgttttgtcatattaccagagttggttttctgattccttctcatttggatatgctttgtcatagggaaggtctagggctgaaggctgttgttcagattcttttctaccattctttttctattcccttgacgtagtactctccccacttttcctatggatgtggcttcatgtgagccaaactgcagtgactgttgtctctcttctgggtctagccacccagcaagtctgcctggctctgggctggtactggccattgtctgcacagagtcctgtgatgtgaaccacctatgggtcgctcagccatcgatatcaacacctgttctggtggaggtggcagtggtataaaatggactctgtgacagttcttagctttggttgtttaatgctctatttttgtgctggtttgcctcctgctgggaggtggcactttccaaagagcaccagctgtggcagtttggagaggaaccattggtgggtggggctgtagaactcccaagattataagccctttgtcttcagctaccagggtgggcagggaaggaacatcaggtgggggcaggtctaggtatgtctgagctcacactctccttgggcaggtcttgctatggctgctgtgggggatgtgggtgaggttcccagatgaatggagttgggtacctaagagcattatggctgcctctgctgagtcatgctggttgtcagggcagtgggggaaagctggcagtgacaggcctcacccagctcccacacaaacgaaagaaccggtctcactcctactgtgaccccccaacagaactgagtctgtttccagccagtggatgaaccaggcttgagaacttgccccaggctacgagcctccaaactgcaaaagaaaagggcttcgttctttcctgcctgcagagtctgcacacctgatctgtgccctgcctcaagttctgaccaggaggcttctcacccagttcaaagtgtcacaaagtgcagctggagatttccttctccctttggtgttttccccctctcacctgagtgccctcccagtggatccctgtggtgccaggcaggaatggcctgcctggggtccagcaagctcccagggtctttcccgctgcttcctctatccctgtattttgctcagctctctaaattgactcagctccaggaaatgtcagaaacttctcccacaaacagaccttcagtttctccagttggggtggggtatgtttggaagaggaggatctctctttcccatttccgaagttggggcactcacagtatttggggtgtctcctgcctccttcagagggtctgtgggtactcttgggatttctggtttgttcttgcagttgatctggagctaaaattcataatcggaaatggtattgtattttgaattttagttactgcctgttcattgctctgaagcagtgtttttctccccccaactttttttcctttgtgcttcagattggataattgccatcaatctctcttcaagttcacttagtcttacttcttttgtttccattctgcttttaagcccagtgaattttttatttcacatgctgtgtatctcagtttgatgaaggccaatttatcactctactgcttttaaagtaggctcacaaaatctaacctaagtgaggtttcacctcttggtctgaggctttttttttccattttccaattaataataagttatgagtaaatattatttataataaaagacaaagtctatgccactgctttccattttcaggactacctatggaaacctttgctttccagtctgatgttgacagaccattttaaccaaagctgaatgaaagtatttggggtttataataattttattccatcttcttatccaagtaaggaagctctccaccattcctagtttgctaaggctttttctttttaaaatcacaggtgtgagctgcattttatctcaatcatctattgagatgattccaggaactgtttcatccttatttattaatagtggtgaatgatattaacaggctccccaccgtggcactcctgtgataacttcttggcagtatgtactgttggttacctgcttggcatccagtctcctttttgtcttttctaacaaaactcaacttgtgctcaggtgtctcttccaccctcagatgattcatcgaaagctgactgaattcccagtgacaggagtagactgcccttcatcttagccagatatcacaaggctattcctgagtgactaaggaaagacttatgtcccatgatgtggtaaggccctatggacataaaacataaaatacctctccagagaaaaatatagaatcagaaattatgattttatagaaaattcatatttttaatcagtagattccttggataactaaattcattggactaagtattatttcccaaatcaaatgtcattatgttgtacattctgtttgttaaacatctgacacctaagcatatgacatcctttctttgtgctataaattttatttttgcctattgtgagtatatattactctttatactgaatttttaaaaaaattaataaaacaatttataaatatggcaaatgtgaagattggcagtagttcataagttgtatcagcttaatctaaatgattcagccgggagattattcatctttcttgttggtttctgtttttcaaaaagctatagttttgggtttataaaaaaagcacagtgtaactcctggtggttaagatgagatattttgtcaacttcctgctgcaggagaacttaataatgaaattattcttatagctctctaaaaatttggatatattgaaatatttttcttcataattctttagtgtgcttctgttgcttctctgctaaatatgaacaaggacgcatatagccccatataataggaaaataggatatagcagtcatttgaggataagtgactgctacaataagataaaaaaggtattgtcaactctgtcaataaagaagatagattttattgccttctcaagtaacagcttcccatgtaggtaggtagcaggtcaaggcaagaagacagctttgctccatgatgtcatcaaaggacctggttccttctatgccatttctccatcaactcaggatgctgtctttatccacataggtgatgcctctacattccagaacatgaaagtattctgacatatcttccttggacatgacatatttttctatgtattgctggactttgtttattgtcactttaggtaggattttaatgtgtatgttgtccctgaagattggaattctttccctacttaaattctttccctactgtccttgtccagttttggtatcaagggtgtctagttttaaattctccagtatagttttataggataaggattatttattgctttggtattcatggaaaagcctgagaacttatttaatgattttccatttcttcttgagtcagttttggtacttataattttctctatggtaagcccctgcatatgttttaaatatattgagataaggtgatcacagtatttgcaaaattctaaaaatttctgtgattatgtccactttttcatttctaataccatttctttgattgtttatttctctttttttctgctaagccatctttagcataactttcatcctcatgatgccaaggtggctgtttgcagcggaccctatccttgttggactgaacaaaggatgacaaacatgggaataaagacaaagacaaaagagtatatttggaagaagaggtctgggggctccttgcttccagtgaacacaggccctgagcctttacagcccttcgtatttattagagtgaatagggagaaggggggtggttgtcggtcagtagcttgatttacagcaggcttgcaagactgcattcgtcaaccaataggctctagatgtcccattagataacctcaaggagcatgacaccagggagtgattgccttcagcaaaccttctggtggctggagcagaagcgactttgcccacattctgcattcatgataaacagtttgctgtttgatcatatagcctccagtggaatgttgagttggccacgatccctttgccagctctctacagctgttctacctgttgacatcctgtgtcatacccaagcaggaagaaggttgtgtgagatgacaaaaggccagagttacatgccagctgtgtctctttccacacatccaccaaacccccagcaaatgtgtacttaaaattcattggttacagagccactactccttacaaggagactggggaggtgagtattataagctgggcagatggccacttgaagagcatcaatgttctgctgtggaaggagtgcaaaatagacaccagagagaccattagcagtgtctgccacagctattacatggctaggtccacctgactgaaactaagccttttctatgagactgaagtgctttgagagaaatgctgaccttgtcctttctgcagcttgcggctttcagtcacccttggattcagagatagaagtcatcttaattccatcactgaggccaggagacctgaaagaaatcaattcaagagtaaggagaccaggcgtgcagtgtgactgggcgtgcagaggtcagtgcatctgtgatgactggtgtaacagcatcactgcctgtgagccagcaaggcccttggctcccaggatgaagctctccagttctgataaggcccctgggggagagaccggtcctaaacatgttcaagaataaatccatcagctaacttcagaccgtgattcacacaggaagggaactttaagaggtcgccagggctggtatttttgagacgttaggcagccctctctgaggcgatgacaagtgaatggcataaaggagccagcccagacgaaaatttggggttagactatttcgacccaggacgtgcaaatacataggttacaaaatggaaaatggtattttggaggatgggaggcccgtgtagccagagataatgggagaaggtgagggggcacccaaaacaatcccacaagctctctacatcccccttcctagcccacacacatcacccatcagagtgatcctccggactccggaggcccccaagattgcctttcccttcccggtcggcagtgacgctcccgcaaggagctgacgcccaggcccttagcacctgtcacagccaagcacccttttactccggccctgcggtcccacccctcgccgcaagccccgcctcacccggtctgccgctgcgcctgcgcgactcccagaagcctttggggggtgggtgtgtagtcagagcggcctctgcttccggccacacccaggcccagcgttggccaccacttatgcggcggctgcggtccagggacaagtgagagcgacccgcagagggcaggacggacgggcgttgcataggcccggggccaaaccgtatcttgcaacctgagctccgagggccgccgcatccgtccctgcttgggactacgcttcccagcgggcattgcgccgaggccacgcccggttccggcggcgctgcctgcgcactggaagtgggaagcgccgggcttctctaggctgaggggcggggcggggcggggcggggcggggcggggcggggcggggcggggcggggcggggcggggcagcggggaggggtggggaggggcggggcgcggccgggggcggggcggctccgcggcgcggcccagtggatgccgggccatgggggagcgcgcgcggggctgttcgctgggcgtggcgggcgggtgtggccaggggtgtgggtctgtgagggaccggtcggaagggcgtcgcgcggcctcgggtgacatgcggggggcggcgagcgcgagtgtccgcgagccgacgccgctcccgggtagaggcgccccccgcacaaagccccgggcgggccgaggcccgactgtagggactccagccaccttggccctccctgcccggggaaggccgcgctcaaggaatggcctcgcatccaaaggccagcgaggagcggcccctacggggcctgggcacagaggtgagagtgacaggtgtttggggccgagcggacagggacgaattcatctcgggatgagatctgggagggggttgggctctcggggaccagttgctggagaactgtgcccctggtctttgaagctggtggagtgggagaatctgaagatttggaagctcaactgattcagagcagcaagccgcggtaaaagggtgttgactttcccagggtgactctaactagacgcttttcctgttttcgtgctcccagggaggaaaaaaacctatctccacgttgtggcagtccctaggcagggtaatgatctgatcccaccttttcatgcaggaagggacgtttctaggctggtgatttgggactgtggtgtagacctggtctctagctactcctttctctttcagctctgccttccagggacactgctcttccccaggagagaaacaagaagctggaggctgtggggacaggaattgaacctaaagccatgtcccaggtgagttggcatttcatctcttgtctctgaaatgcagtcttgcttttcgggacttaatgttgcttattttcttgaaagttttcagtttaagagacctgtttgggcgcgggtttctatttcttcacgttctagtgaagtgatgggctacggggaaaagtttaaactgcccggggcctcgatgcctgcttcttcttcatcccaatcagccttcattcttgattgatgaaatgattcagcctctcccttgtaccgcttttctcagagggactctgatggaggaattgtgccccttgaggaacacggcagactcttctgctatacatggtttgtttggtgaccactttgtgccagccactgagcaaaccaatagctaagccctagtccctgctctggagctcacagcctgttgacccaatgtcaaggaaacaagcaagattctagaatgtgatcatccttgggccaagtattatgagcgaggactacaaggcgctcctggcttccagcctcctgtagcggaagggtaggcctatttaccaaggaggtgatttttgagccttgccttgaagggagagaagatgtttgggaggcacagtaaagaaagacaacattttagggagaggaggcgcaatatgaaaggcttttccacttgattttgtggctttaaaacatgccagtaaatagttgtgtttgtttcggttggcttctcctataaatatcatagctagctcattaatagatgaaccatttcacttccactgaggcctcaaaaaatatatgtacagatgaaccagcttccagttgtcctacccaaactgctcttgagtgggttactgtgatcttcacattaccagatgcagtgctcaattcttagtcttttttgactatcattggtatttgaaatagctcagaggctggcaaacttgtgctggatgaggccacagcagaaaatatgttaggctttgaaagtcctgctgcatctactcctttctgctcttatagagctaaagtagccaaagacaatatgtaaatgaatggatgggctgtgttccagtaaaacttcagttacaaaacaggtggctacctatccctcaaatagctcatccctgtccttcaataggcccccttttttcccttggctactgggatctcacactcatctgactttcatcttcctgactgctcagtttttgccacagttcttacctccgtgacttgaacagagtgtgcctcagcactctgctcatggccctttctttttttgtctgcatgctgtctcctggggatagtagcctgttccttgtctgtacaacctacccacatggtggctcctcccagattcacattgtgagcccaaacctctcctctgagccgccggcctgtgtatcctgctccactcctctgcctgagtgtctgatgggtaactcaagacagcctgtccagacccgaagtcctgagagtctcccataaaccagctcctcccacagtttgagtcttagtcagtggccgtttcatcctctcagttactcagtccggaagccttgtcatgattggctcatttcttgccttttccttccatatttggtcctgatgcaaatcctgtcagttctatttgcaaattatgtgcagaatctggcagttttcatcacatctatcaccagcagcaggtccaagtcctccttttactgtgggcttcttgactgtgcttctgtgacctcctgcttctgctcacgctccccacagccccttcccgatgagcagccagaggggtctattcaaacatgtcaccttgtgtcacgctgtgctcaggaccctccagtggtttctctgaataaaagccaaaactcttcctgttactgaccaggccctacatgacctggctccttgttacccctgacatctacatcactctcttctttctgaaaaatcgccttctcattttcctgctcaccctgtctagaatttcagagcctcctacctgttcttcacatccctcttccctgctttgcttttttcttttagtacttttcttttgagacagagttttgctctgtcactcaggctggagtacagtggcgtgatctcggctcactgcaacctccgcctcctgagttgaaatgattctccttcctcagcctcccgagtagccaccacacctggctaattttttttttttttttttttttttttttttttagagacagggtttcaccatgttggccaggctggtctcgatttcctgacctcaagtgatccgcccacctcagcctcccaaagtgctgggattacagccatgagccactgtgcctggccctcgtagtacttttcaacatactatatacagaaatcccacgtataccaaaatttgcacttattcatcagccatgtggagcctgcagatatgagaagtcagccctcagtggacacaggttttccataccacaaataatcttttttgagacaaggtctcactctgtcacccaggctggagtgcagtggtgccatcacggctcactgcagccttgacctccccaggctcaagcagtgctcccatctcagcctccgaagtagctggaattacaggcatgtgccaccatgcccagctaatttttgtattttttgtagagatggggttttgccatgtttcccaggctggtctcgaactcctggcctcaggcaaccgcccgccttgggctaccaaattgctgcgattagaggtgtgattccccgcgcccagacaataattgtattttcagtctgcatttggttgaaaaaatttgcatataggtggacccttgcagcccagatccatgttgttcgaaggtcaaatgtattttacttaatttatctcagtttctcttgtctcatttccttacttcataggcaaggatttggggcagttttgcctaatgtctgatacagaaaatatttggtggatgaatgtttgaatatagtcttaaagttctcttgtggccagtgttttgatatttagtatagtgttagaatagtcatttttatacctgaaaatgtgcttcgtccctgatttttttattttgtttttttgcttttagagacagggtctcactctgtcacctaggctggagtacagtggcacagtcatagataattgcagcctcaaactccgggcctcaagcaatcctcccaccttggcttccaaaggagctggaattgtaggtgtgagccaccatgcccagcccctgattattttgtatgaatacattcctagaagtttttcttgcctcatggattaaggtttcctaagcttatgtgaaatcggaatacttctaaaattatttttggatagaacagcagtggtgcctcaaaagctagaattcatgttttgaaaaaaatgtacacttcatcaggaataatagttattaccaaataaatgtttatttgtatgttttaaaaattaactgaattgaatttaaacaaatctttttagtgtattttttctataaagtacttcatattcattcttttctatgaaatttcaacagaaagatttttctgtaagtataaagttgcttttattttttgttggtattcttttaatgtctctatctttgtgtgtgtgcgtgtgtttatatattatatagaatatattatatatgtatattttatatatatattaatatatgtatattatatatatatgtatatataatttttttaagagatgggagtctcactgttttgcccagactggagtatattggctattttcaggcacagttatggtgtactacagcctcaaactcctgggctcaaggaattctcctgcctcagccttctgagtggctgggcctataggcgtgtgccaccatacccagttcatatgtatattaagatgagttaacttacatcagatgcctatatcaggagtagattctgtgcctgtataatgttttctctgtggtatagtgtaaaaatgtgaaacccattttgaagtctgcatatttatgttgcagcaacaggaataagaacaggacctgcacatttgacaatgttttgtctccacctaaattaagtaggttgatccagacatcagttagggaaagttcattttatttttatctgaaaacatgttttctactggaacttgtttcactgtcagggtgaatggatactaagtattactgctattatcaaagtggaaccttttaatagaagtagaatggcaaagtggtcaaaggtcatggactaggttcacatgctagccctagcatctaatcattgcgtaaccttcaggcaactcaagtgaccacattttcttcatctgtaaaatgaggaaaataattggacctgcctcaagcagttcttgtaaggattaagttaagatgtgtatagtgcctggattgaggtacctggcacatagtaaggacttactagtgttagctggcagcatcctcatgtcatcatgacggttttagaaatttacaggcaagacacttagatggcgtacttcaaaaaaagtgtttaatataggaccgaactgggcaaattatggcctataggccaaatccagcccaccaccacctccttttgtgtggcccaccagctacaaatgagttctacatttttcagtggttgaaaaaaatcaaaagaagaagaatacatgaaaattaaatgaaagtcacattttggtgtccataaaaaaaatttcattgtagcacaacatacttgtttgtttatgtattatctatgactgcttttgtgctacagtggcaaaattgaagagttgcggccaaggctatttggcccacaaagcctaaaatatttactttctggctctttacagaaaaactttgctgacacctgaagtggaggttaagagcatggactgtggagtcagactcctgggttcaaaacccagctctacagctgactgtctgtgatcctgggcacattacagctcaatattttctcatctgtaaaatgggaatagtaatagtactgactattaggatcgttgtgaggattaaataagctaatatataagtatatagaattgcgtctgaagtgttgtaagtgctttcagctattgttattgctgttatttacagtaaaagacatttttaaaacaaaagtcattgattctatacataaagagctgtccgaataaacagaaaatgtcttaggaggatatatgtatattgctaacgttgggtccctctacgtgattacattgaaggcatttaacaaaccactggtacaaaagcagatcactaatgcatagcatgatcaacctgggaaactagggttgattcttcttggcaagcaaataagttcctcttcttttatgccaagatgcttcaacttgcaaaattattgctgagagctgaccagcatttgttttagactagcttcctcaggtagccatattagtgtgtcttttgctcaaggacattaagcagttcttggctgtttcctgcaagtattacctcatggtttacactgcagggggcctttcagtccccagcttaggagacttctccatgatgagtttaccatcaagagtgtagctctgcagttgactgattcaactccctctgcagttgatattcactcaaattgggatatcacttacaaaacccttttgacctatttttacacaattcagttacaaatgtccttaaagtttggtagcaggttaaagaacaagtgattgtatattattcagcagatatcaaacctcaaagggacttttgtttctagtagaataatgtgaatctttaaaaggttcagctcttggttggtgttgtggtttgttaagtgaggtatttaaattaggttttgtgtagtcagatgcagcatggtgagggacacttagagcagaatggcaaaaagattgtttattactcacagattccagagaacagtggccagcacaccttgcagggcttactggaagggcttggagacattgaggacacacatgcccagccaaagggtggggaccaagagagagggagggacctgtgggctggagcctttattggggttcagggcattatctaggtgagtttcccaagacagggttggcttggatactttgaagggagctcaaggctcagtaagggaacttgaaggctacattatcaggttcaccaggcttcatgcagaaggacagtagtcatttcatagtatggggccttttctatctagaacacacaaatggggactgggtgaggactgcctgaaaatatataggtcaagggtgacaagcagaggcagcatccctatggatgagagttatgacagtcagcatcattacaagtcatgttcactgcatgcttccattgtgccttgcacgttctaagtgctgtgtatgtgttgcctcatttaatccaaaacataatctacaaggttggtattgttgccttttccattttatagctggggaactgaggcacagaggcgttaggtaaccaagtgaggtttcagagctggtgagtgctggaattgtaattcagcttttggggtagtccaactgtttcgcatgttcatttcagtttagactttgaaaatcccacagctgctagtcagttaaatctgccttctgttagccacaggttcctgggattagagttgcaactgaatagatgtttaaaatacattggaacgtatcagagttgtaggctgaatttgtaaaactatgctccataaaaatctgccagcaggagctgagcagccccatcttgccagttggtcaagaaaatcctgctcatgccaagctgttagcaaatgtgctcctgatagctcctcataatgcctagcttctccaagatggcaccttggttcgtaaaggcatttcattaattaaaaacattatagtgctttttgtttttcattcttattacatattcattttagaaaaaaaaattgctagatttttttttaatgacctctactgaacactgagagtaaaaatagaaattcttagaacccagtttagtcatgaataatattgatgctttgaggttcatctcaagtttattgcccagttcttgtgctgcttcaggccactcacatgtccccatgttggacagtgctgtagtacctgttgtgcatagaacaagttagtctttgttatttatagttttgaattgatgtcaggggtttttcttgtggctgcctcctttcacctccacaaaactgcaagttctccaaagtcaggggctgtctccatatttttctcttttacctggagtttaagacagaatgaggctagctgtacaatacctaactagatctccacagttctgagtttatagtctcttactcaaaatgaagacaaggaatctttagatccctatattagtttgttagggctgccagaacaaataccacagaatgggtgtcttaaacaacagaaatttcttttctcaagcttctggaggctggaagtccaagatcaaggtgcctgcaggtttggtttcacctgaggcctctctccttggcttgcagacggccgtcttctctctgtgtcctcacgtggtcttttccctgtgcctgcacaccgtggtatctcttcctgttttaataaggacaccagacagattgggttagggccccacccatatgacctcatttaaccctaattacctctttgtaggccctgtctctaaatacagtcacattcaaaagtactggggattaggagtttaatgtaggagttttgtcaggggacacatttctttctataacaaacccccagtcatgtgggggcatgagcactggttgagcaagaacatggttatatcatttcagggcttggtgacatttggggatgtggctgtagatttctcccaagaggagtgggagtggctgaaccccattcagaggaacttgtacaggaaggtgatgttggagaactacaggaacctggcatcgctgggtaagggctcccaccccttttcccacccctcaccctacccacgtcctggactaagaagcctttcatgcctttatcacccagacctgcactgccctcttgcgtcaagccaaggggactgcatctcagtctggacagccacacagtatgaccaggttgttttttatgtgtctaggactttgtgtttctaagcccgatgtgatctcctcgttggaacaaggaaaagagccttggacagtgaagcgaaagatgacaagagcctggtgcccaggtgagtgtgggagaaccaggtagggtgaggccactgctggtcatagttcagctgactcagacacgcaacatcttcagcagactcttcctaagcctcttgcttaggaatatctgttatttttactatttgggaatacagaaatttcaactacagtattatttccagaacagcaaattattaagacaaggaattagaattatagatttctttcagaggttttatcctaacaggaaatggttacagtttctaaagcattgggaatcttacaaggtttctttgttcaattcacacttcaaaggaaacgcttgcattgacaacaggacaagttactgacagttataaattaaagtgactcacatgggtcatcatatagcataagagaacaagaatgtgtgaaagtttccaatttaacatcatatgaaatcacatactttgagctagtttaatgagatagaactgttttttcttcctgcagatcattcatctcttcttgagactagttaattgtgaagacttacatttttaaggccaggatctggacttttattagttagcatcgtaataaaaaaaaaggaggtatgtagagatagagatgaaattttttctagatgaaatggacaaggagtgaaaaagagttgacttaaagctgaaataaggatcatatggcagttttcttctatagcctccactttctctttatattagacattttattttacatttaagtctttgtgagctcccttatctcttgatttttaattgctttttccagtcttctgctaaaaacataatgtgaactcttattcaacttttaggtgggaaaggtcttattgtggcctttaggactatggctacacaaatttaggaatgtagggttggttgaatattgctagtaatataagaaagctttcaaaatgatatgcttttcattttcttccataaaaataaatgactatatgcttttttgtggcttttaatttaacggttgcattttggaatttttcttcatactaacacatgataaaagataaatttaccttctttacgtctttcagacttgaaggctgtgtggaagatcaaggagttacctctcaagaaggacttctgcgaaggaaagctatcccaggcagtgataacagagagactcacaagctataatctggagtactctctgttaggggaacactgggattatgatgctctgtttgagacacagccggtaagtcacaagacaaatttcaggcaagaggaaggatccttcatgaggaaactcttcttgagggaagagaccatgactacaacaactataagagaagttttcatttgaatacaatgcttcttatagacagattatcccctcagaacagagagtgcctaatctccatacacataagaacagtggagggggaaattgagttgtaatgaattacaaacaaatctgtcaaggtcagaaatgtttgacttgtgatgaatgtaagaaagctttgagcagaggccaggcgcggtggctcacgcctgtaatcccagcactttgggaggccgaggcgggtggatcacaaggtcaggagatcgagaccatcctagctaacattgtgaaaccctgtctctactaaaaatacaaaaaattagccgggcgtgctggcgggcgcctgtagtcccagctactcaggaggctgaggcaggagaatggcatgaacccgggaggcggagcttgcagtgagccgagatcgcgccactgcactccagcctgggtgacagagcaagactccgtctcaaaaaaaaaaagctttgagcagaatatcaacccctccttttcatcaaagatttcatacaagagaaaaactctgtggacttgttgaataatttgtatgaatatgggaaagccttccgtctgttaaaaggttcatactgtgtgtaagttcatactgtgtgtaagtatgacaaactctccatagcagaaagtttctcctatttttctgtgtttttccccaaacatgtatgctataactaagccctgtcattatttgacctggtgtaccagaacttaagttgcagttcttggtatggagtgccttttttgcagtgtggacacagtccatcccactgagaccaggtgagttcacgaacatggtttgatttaaaaaacgtgcttttaccattgcagggcttggtgactatcaaaaacctggctgttgacttccgccagcagctacacccagctcagaagaatttctgtaagaatgggatatgggagaacaacagtgacctgggatcagcaggtaaggatgtccctctcccatatttgaatctatcgtcgggtacctccatttccaaacttcagttttgaattatggaggagggagggggtgtcttctgacatgctggcctgaattttgtggattcctaagataagaatttggcatttgtagaggtgaaagttggtgtctttgttaggcttgaagcgttatcttcttgtgtctttcagatcctactcacctgtttttctgtttctttcagcagtaacacttttctatcaacaaggaagtggttctcaattttaggatgccaagactattggccaaacctcatctcttttcactttttcaggacattgtgtggctaagccagatttagtctctttactagagcaagagaaggagccctggatggtgaagcgagagctgacaggaagcctgttctcaggtgagtgcaggagagcctggtgtggaaaatctactgcaagagagagcggagcttttaccaaaaaggctgcatcctcactaatatacagtaggaaactttacccagggtctctgggtctggaaagaaaattgaactctgggagttccaaataattctttcctcctcctttgcccccttctctccagtaactgccatttccctgaagttccttcttttcttggccactgggacgtgtatcatccacttgcttccttaaatgatcttttctggaccctgatgcacttttgagctgacttccaaaggttttctcttctgtggttaaatggcctattgttttcatcatgcatccattcctgtgagaaccacaaattgaaagttatgggattgagccactctgctgagtattggcaggcgattggaaaaagggagaattacacataaatgtaagccatcagtgaattactctaatggaaaggataagacatgtttatggatagcttgcatgaagtagagtttgcagaatttcaaatagggcattatagagacaaaggagatgttgttcccagtggtgtctatgttttagtaggacaggtgggtagaagttgaattgcaagaaggtggaagtaaaggatcttttcctcttgatgcacaagggaaagaaaggaaatttccatagaaaataatggtttgtagaaaatgtaattgtttactgtttggcaaaagaatataaaaccgtgacgttatcacaacatacaccttagatccatttaagtcaggataaacacacattttttcacatagtagaaattacagtgtatattcagttacgcatacacgtttttcatgtggattccacgttgtatataccattgctcacttaggttgctttacatttcttagtattaaagatacaattataatagatttttttcaagttaagtgaaaactacacattttggggattgctgtattcctggatatgagcacctgctaggctctgaaagtttttttgtttttggtgactagcaacaattagatgtatgagtttaattgcatcttgaaagtattggttatttacatgaaaacttttgctcattatttgttgaaagattatacactaaaattattctttttttatgaaagaagttgaacattttttcgtaaatttggtttttctcttatcttcttgtaaaatgtctgtcatttgtacccagttctctcttgtgtgttaaatattttcttaacagtctcagtgactgctatgtatataagcatactaattctgtgatatattgtctcaaactattttcacatatggcaataagagttttaattttaattaggtcttttaaaattatgacatgtaaaaattttcaatttttatatagtccagtatattatttctaatgtgatttctcctatttgtgtggctaacaacttgacacatatagttctatttcatttttaatgactatttagtattatatgaatatatataatttatttaaattatttactgttgagtatatttaaacatttaggaggtcttctccagttttcacctataatcaacagtggtccagtttgtacatatcttcttgcttacatgtcagaatatttcttgaagatatatgcttggaaatgaatttgcatggtcgaagtatatgtatttttaaagtgtcatggatattttgctgtaccgttggtaaagaatatatgagaatactgtttctagacatcatcaccaatatgggtattttgtagtttaaaaaaaattttgccaagctgctagatgaaaaatgttttatttaatttgcatttccccaactacttacgatgttgagaatatgtgctcttaaatctgtttagagtttgtattctattcatagtgtgtttatactcattagtcacatttctattgggttgtatattttcctgtatttatgcaacattgatatgaatgctattttttaataagtttgataaaatttttccccaattttgtgtggtctagaagtttgcatatggtatttcttactatatagtagcttaacttgggaattatcttcatttatagaagcacgtactttgttgattttttcatttgtttcactcctatctcttaaaaaatgaatagatgtatagtcccatttgaatcatataatacatttgtttgaccttctgtaacttaattatttctctctcctttatcaccttccttccttttctttctttccttctcatttttcccttctttccttacctttctcttctgtattttgctgtgtggcctgttttttgtttgttttatttacatatttttattatagaagagtacacataaaatttaaccattttgaagtgtacaattcagtgacagtatattatgtgaggtgatatggtaattagcttgattgtggcaaacatttcaccatgtataagcatatcaaaacattttataccttaaatatatacaatttttatttgtcaactatgcctcaataaagctggaaaaatattgccaaaaagagagaaattgcaaggcttcattatagaatggccagagaattgaggatgttttcaggcttgtggaagtaaccaggaaaatgtgaaaataattgttttttttttttgagtcagattctggctctgttccccaggctggagtgcagtggcttgatcatagtttactgccacatcaacctcctaggctcaagcaatccccctgcctttgcctcctgagtagctggaactacaggcacatactaccatgcctggctaattttaaaaagttttttagagatagggtcttgctatgttgtgcaggctatgttgtcctggcctcaagtgatccgcctcaagtgatctgcctcaggtgatccacctcagcctcccaaagcactgggattacaggtgtaagccactgtgcctggccctaaatgtaatagtttttagagctgtaaaatgtatgttgatgaattcaccaattagtgaattaattcactagttttccttttggcagattcctttttcctagcacacgaaaaaggaaatatgtgttttcttggtatctttcaggccagcgatctgtacatgagacccaggaattatttccaaagcaagattcatatgctgaaggggtaacagacagaacctcaaacactaaacttgattgttccagtttcagagaaaattgggattctgactatgtgtttggaaggaagcttgcagtaggtcaagagacacaattcaggcaagagccaattactcataacaaaaccctctctaaggaaagagaacgtacatataacaaatctggaagatggttctatttggacgattcagaagagaaagttcataatcgtgattcaattaaaaattttcaaaaaagttcagtggtaataaaacaaacaggcatctatgcaggaaaaaagcttttcaagtgtaatgaatgtaagaaaacttttacccagagctcatctcttactgttcatcagagaattcacactggagagaaaccttataaatgtaatgaatgtgggaaggcctttagtgacggctcatcctttgcccgacaccagagatgtcacactggcaagaagccctatgagtgcattgagtgtgggaaagctttcatacagaacacatcccttatccgtcactggagatactatcatactggggagaaaccctttgattgcatcgattgtgggaaagccttcagtgaccacatagggcttaatcaacacaggagaattcatactggagagaaaccttacaaatgtgatgtatgtcacaaatccttcaggtatggttcctcccttactgtacatcaaaggattcataccggagaaaaaccatatgaatgtgatgtttgcagaaaagccttcagccatcatgcatcactcactcaacatcaaagagtacattctggagaaaagccttttaagtgtaaagagtgcggaaaagcttttaggcagaatatacaccttgccagtcatttaaggattcatactggggagaagccttttgaatgtgcggagtgtggaaaatccttcagcatcagttctcagcttgccactcatcagagaatccatactggagagaagccctatgaatgtaaggtttgtagtaaagcgttcacccagaaggctcaccttgcacagcatcagaaaacccatacaggagagaaaccatatgagtgcaaggaatgcggtaaagccttcagccagaccacacacctcattcaacatcagagagttcacactggtgagaaaccctataaatgtatggaatgtgggaaggcctttggtgataactcatcctgtactcaacatcaaagactgcacactggccaaagaccttatgaatgtattgagtgtggaaaggcattcaagacaaaatcctcccttatttgtcatcgcagaagtcatactggagaaaaaccttatgaatgcagtgtgtgtggcaaagcctttagtcatcgtcaatcccttagtgtacatcagagaatccattctggaaagaaaccatatgaatgtaaggaatgtaggaaaaccttcatccaaattggacaccttaatcaacataagagagttcatactggagagagatcttataactataagaaaagcagaaaagtcttcaggcaaactgctcacttagctcatcatcagcgaattcatactggagagtcgtcaacatgcccctctttaccttccacgtcaaatcctgtggatctgtttcccaaatttctctggaatccatcctccctcccatcaccatagcctcgagacgtcatttctgtttgactactccagcagtttaaaaccccatctccctgcccttttgttttctttttgtcccttattagttagttcttcacataagtgtaaatgtaacttattcactcctcttgtaaaacttatagtttctttaaattggttaatgtgtgagatgtgctcagcacagtgcctggtccatagtaagtgctcagtaaacttagctgttttaaaaactttgtatttgaacattgaaaagttacagtagtcagctctgataaaaaaatgatgcagtagggtgagggtaggaaaaagcacattttctatcaggaacagaattctccagtagtgggtgaggttttgcctttgttggttttaaaacttgattctataatgccaagttagttttgtggctttccatctgaccctatgtgaatgtaaggtgatgtgaccttgttggtgagaaaattaaactttacatttgacttgatttgttttagaaagtctagggaccatgaatgaataggccagctgggacaaatgaatttaaaaaatcagaaaaatgcaagatttatatgcatgaagttaaaacaactgacgttactcaagaattagaaaactttgcaagatttgacttgtttaaaaatcacatttataagtgaaccgtattaaaacttttaaggaaccattcattgtgaggtaaactgatccagaataggggtcagcaaactatgactcatggccacagtctcactgactgtttttgtatggtccatgatctagaatttaaaaaaattttaaagggttgaaaaaagtgaaaagaatattttcaacatgaaaattatatgaaatttaagttttggtgtctgtaaataaagttttgttggcttcagccacacagtgatttacaccttgattgtgctgcttccaggctgtagcagcagagttgagcagttgtgacaggagaccatgtggcctgcagagcccaaatatctactgtctgatcctacacagaaaatgtgtgtgatccctgctatggagcagaggttatcaaactaaagcccatggaccaaatcctatctgctgcttgtttttgtaaatagagttttatcaaaccacagccatgcttacttgtttagctattgactatggctgctttagacaactgtgacagactatatggctcgcaaaactgcaaatatttcctatcctttaacagaaagtttgccaacctctgctctagagtagagaaaaatgtataaaagattttaattttatgagggcaatacaactgtcacatcagaaacaagaaaacaaatgataaaggaactcatttatcaatagaggtgaaaggaaattattaaactatattgaaaaataaagatgtcaataaaaggagaaatgatatttttctagatgaaatactcaatattgttaaaatgtttgtaaattataattcagtcccagtaagatatatttactttgacggtaacagggaagcataattaggcaagaatagcaagaagttttttttgttttgttttgttttttgagatggagtctcactctgttgcccaggctgaagtgcagtggcgtgatcccggctcactgcaacctccgcctcccaggttcaagcaattctctgcctcagcctcccgagtagctggaattacaggcacctgccaccacgcctggctaatttttgtatttttagtagagatggggtttcaccatcttggccaggctggtcttgaactcctgacctcgtgatccacccgccttggcctcccaaagtgctgggattacaggcatgagccaccacgcccggccaagaatttttttttttttaagagatggaggcctcactctatcatccaggctggagtgcagtgctaagatcctagctcactgtaaccttaaaatattttttttgtagagactgtgtctcgctttgttgcccaggctggtcttgggctccttgcctcaagtgattctcctgcctcactcttccccaaaatttttgaaatagatttctttgcatatgagattttagtatataatggcactattatttcaatatcgggaaaattatgttttgacaattggttatccaccctctccaagaaaaaagttagaagcacatttacaccttacagagaaatatgactatcatatttgacatatctaatcataaaataacatgttagaggcaaatgtagaaaaaaggaacgtattatcaagtaggacatggagtcctagaagccataaagaaatcgagaacaagttgggctatgcaacgatctaaaacttcagcatggtgaaaggcaccaaaaacttgtaaaagacagttgaagggaaatgtatacaacttatagaaaataacagaatgctgttacatatacagagcagtggggaacaacttgccatgcacactgataggcgaatcaccctgaagaatccaaatggataaagaaaattcgtgaaattcttaacctcattaatcagaagaatatgaatgaaaccacattttcctggctcttggtagattacaatataaaatttggataatatccagtaatggtattagtgtgggaaaacaggtacttgatcactattagcagtgtaacttcgtcccctatctcctcggatggcatgacctatcaacattataaacgtgaatttttttcaaacagtaattccagatctaggaattttatcccattggaataaataggtagatataaatattgttttcttgtagaattgtttcaattatgacaaataagaattcagcgccctgccaagtggattgactaaattgtagttattcagtactgtgttgtgcgattagtagaaagcagttaagctctacatacacttctatggagtggcgtctacaacatatttaatgaaatatgtggtttacagaaccttacaggtaaaatgacctagtcatagagtcaaaattaatactgaatatatatgtgtgtatgtacatacaaacacatgcacagcctcagtatctatgttgaaatctggttttgtctttaacacacagacttttcctagcattttgcgggcactttccctttcttcattctgtattgttctgatgaactgtcagtgacacatgctccaagtaagacaaccagattcattctctgtattttgattagagacacagggacaggaacagggccaatattcagctttatgaaccagtatggccagaatggatgttttgttttagtcaatattcattttgattggtgggacctttattatacctgctgtgaagtatgtgggatatgactcctaggctggaattcgtttgaattaagtcatcctttggcagcaacctaaggattcctccacctgtcactgagatccattgagatgattcctgctttctcacatcttggttttgagttaaattctttgagtctgtgaactacctggtattctaatatttctcattttaagtcagagtcaaatactttggttctcaagcaaagagagctagccaatgcagaaatttatactacagaatgattactagactgtagagaagcagagtattcaagatggatgtccagtgagacagatcaaagcacagatgaattcctaatcctattttgtgctgtgaaaggatattcatgatatagcaggatcctaagcccattgtgcactagggtctggatagctcctaccaaaaacaaaggtattgaggaatactacttccaaaagtatatatgatacctgtttataatgaaattgggtaattaaaatttcaaggctacttgaaattctggccttaaggaattgaatcagtacctgtatgtctgtgttgggaagaatctcatactccttttaagcatggggctgtatttgctaaaaaaggcagcagtagatgcagttatttgctcaacaatgatgcttactgaatgaaggggtggcctgcccctccacacctgtgggcgtttttccttgggtgggacgagagactgagaaaagaaagagacacagagacaaagtatagagaaagaaaagtgggcccaggggaccagcactcagcatacggaggacccacgcctgcaccggtctctgagttccctcagtatttattgatcattatctctaccatctcagagagggggatgtggcaggacaatagggtaatagtggggagagggtcagcaggaaaacgtgaacaaatgtctctgtgtcataaacaaggttagaaaatgtgctgtgctttgatatgcacatacacaaacatatctggtgcattaaacagcagtattgccgccagcatgtctcacccccagccttaaggcggttttctcctatctcagtagatggaacacacaatcgggttttacaccaagacattccattccccagggacgagcaggagacagatgccttcctcttaactacaaagaggccttcctcttttaataatcctcctcagcacagaccctttaccggtgtcgggctcagggacggtcaggtctttcccttcccacaaggccatatttcagactatcacatggggagaaaccttggacaatatctggctttcctaggcagaggtccctgcagccttctgcagtgttttgtgtccctgggtacttgagattagggagtggtgatgacttttaacaagcatgctgccttcaagcacttgtttaacaaagcacatcctgcatagccctaaatccattaaaccttgagtcgacacagcacgtgtttctgccagcacagggttgggggtagggttacagattaacagcatctcaaggcagaatttttcttagtacagaacaaaatggagtctcttatgtctacttctttctacatagacacagtaacagtctgacctctcttttccccacactgaattcacaaccgtgtcacttctgttaagcaattagggaaatactggaatttggattattggaatgagactaacaagaaggattcaaggatcttacaaaactttgactctcccttgactctccctctcaacccttaagcaacctccccactgattctcctctccatgcttcccttgtgactggaaacaaaccttccttccttccttcttcctttccctttcctttcccctgcctttcttcttttcttttctttccttttctttctcagagtcttgctatcccccaagctggagagcagtgatgtaatcatggcttgctgccgccttgatctcctggcctccagcgttcctcccacctcggcctcttcgagtagctgagactacaggcgtgtgccaccacacccagaatttttaaattttttgtggatagttgtgccatgttgcccaggctggtcttgaactcctgggctcaagtgatctgcctgcctcggccttctgaagtgctgggattacaggtgtgagacaccatacccagcctgtgactgaaaacttgattgtcccttttctcacatggtcaccattattgcttggctggtaaccaaaatcagagcttagtatgacctgtagtttgaaatacagaaagttaggaaagagattaatctcacccagaaatatttaatttccttcattaattgtaacatctaaaatctagggaacattgttgcaagtgtattttcagggttagaaattactttgcgtaatatagatggactgaaagaattcagaagtttataatgctggattggatcatttatgtccatgcccttcactcatctgcaagttcccatcagggcccaatagcctttccatattcctttgacatgaaagaagcactgaaaaatgtccctatatctccacctttaggtgcagagacttttcatgagtgattacatttgaaaagggtatccgatttgtgtagaactgtggcatgtgtagtggctggattatagggcaatcattaactatgagaagaaagtaaaaaggttataacaaacctcagaactctagagtgttctgatttctgatatttccactgtaattaataattgatccccagcgttgaaactgcactaaggttttattttaattaaaaacactccatggcatggcatccaaatctcacattgacttaaatcagtggcacaggactgggtcattcaggagtctgaatgactgtaattaaaatttctatgaacaattccatgggaattcgaaaaagacttgcatttatgcagagtgagggcttatggaagaattcttatacaagcgtagcttagaacaaggtctattgagaccacaaatgcatactgtggctatttttccaggtcctgggtgtgcatttgttaatgatatctatgatatgagatgtgactagatgaccaccaaaagtttgtgttcttttctattgtctggaattgatcctgggatgtgtctgcccaggcacctttgcttccagttttgtctatcagatgaattttcttcagtgtggtgtgaatagaagcaatatggcactcagggcttggtttttaagaaaaggatgttctgtccagacggaagtagaatcttaatcatatggaatggcaaagctgaaagatagaactctgtgtccctaaaccactatttggaggaaagctccccagtcatcaaggaacaccagcaatggattattatatgagtgagaaataaacttatattgtgttaaggtaatgatatttggatttcaattgtaatagcagctactataattctaatcaatataatacctttgactaatgatagaattcctattttccctgagttatagagtaggaactgtgatggcgtgttagttgcctgttgttgtaacaaattatccccaaaccttagtggctgaaaacagatagacgttcattacctcagtttctttggggaaggaatctaggcacagcttagttgggtgcctctggctcaaggtctctcagatggctacagtcttagctgtgggccagtgctgcagtcatctgaagattttgttagaggataatcagctttcaagctcaagtaagtgggcaggactcagttccctacaggctttggctggacatgttggttcctttccatgtgggcctctctgtagggcagcttacaatatggcaagtggcttccttgaaaagtgagtgagcaggagaggatgcccaagatagaagatgaagtccttttgtaacctaatattagaagtgatatcccctcatctttgtatttggttaattaggagtcactaggtttagcctaccttcaaggggaggggattacaaaatagtttgagtaagaggaggtggggaactttgagagacatcgtaatggctgtccaccacagtcttcctccgtccccacctcccagtgattcatttcccttccagatgcagaatacactcactccttccaaggcccctctcagagtctcacctcattacaggatcacctcaaagtcaataatcttgtcatctaacataggtacaggtgctaatgaagcccataagatatactttcttaagtatgggtattgatctgcagacctttagacttaaagaaaataaagaacaagttatctgtctcccctcctccaccacccctaaccgatacagtggaatcactgctccatagcaattctgaaatctaaccagacaaatgtttggaaattcctttattaggtcacatggcctgggataattatccaccatctgaactcttggttctgccctctgaatccttttttcctgcaacgcatttgcagttcaatagctttttttttattattatactttaagttttagggtatatgtgcacaacgtgcaggttagttacatatgtatacatgtgccatattggtgtgctgcacccagtaactcgtcatttaacattaggtatctctccaaatgctatcaatagctttcttagcttgcttactagagttttaggaatctagtggcgtctcttcattttgtgctgtctctgtccctctcactccagttggcagagtttctactgagtcttctgaaaatgttgtgggcttcatgagaacctcattggggttcactgcacaagacaaaagccacagccacaaatctctttgagataagcttcttagaggcctaattatttgaataagagtgtctgtcaggtcgccttaatctctttacagagcttttgtgtggttaaatagtactgagataccagctttggtctttctgaggttctggattttacagccatgcccttagtttttatctagaccagttttcctagcagtaacttggatttcatttttgcttggaagccctttcttgtttttggcattgtttgccacctacagaggctaagaattttcaaaatcctaatgtcctctttgttaacagttattccctcaatttatatctcttcttttgcatgtttctgtaagcagcaagaaaacaacagcaacaggacattcagcacattccttgaaaatcttagctacgtcacccagttcttcttcctgcattagctgcaaataacaggctgctaaactttctgccattacataacaaggaccctctttcctccagtttttaatggagtatttctcactatccttttagccttcaccagcacttaagacccaaaatttctggacagtcccttttctatacaagtattggacaaactccaagcatcccaacaaaggctttagcattacctgtctcagtgagacaagagttggagattgagttcaacacagtgaactgcctactaaaaacaaaattcagacggactttttgtctgtagagacaacagagtctctacagtgtgttactcatagagtaagaattattagatatgtgaaaacataagccacattcaagagaagaaagcaatacaaatccttaaacactggtattagcaaacaagaatgataaagcccctattataattattctgaatgacataaaggaaaatgctattaatggatgagcagatgggaatttcagcaaatgagtaaatcagtttgaaaatgggaattctaaaactaagaaatacaatgtttgaaagtaaaaatccactggataggtttaacaggaaatttgaggtggcagaatagttaatgaagttgaatatagatagaaattatttaatctgaaacaaaaaggattgaaagaaattaaaaggactgaatagtgctggtgataatgtcaaaaggtgacttgtgataatgctttgtgttctctgatcttcctagatctgtggtttggtgtttgttttcttgcttttagagacaaggtcttgctttgttgcccaggagggagtgcagtggcaggataatggcttgctcaagcaatcctcccacctcagcttctcgagtagttgggactacaattacacagcaccacacccggctaatttttgtatttttttaaagatggggtctcactatgttgcccaggctggtctcaatctcctgggctcaagcaatcctcccactttggccccccaaagtgctggtatgtatcacaggcatgagccaccacactggcctggtgtcctgtcattaattttagaaaattctcagtcattattcaaatattttctctcctttctctcttcccctcctggtattccagttacgcatatatttcaccttctgtaattgtcccatggttcttggatattctgttctttttcttttttcattctttttttttcctctttgtatttcagtttgggaaatttctattaacatatcttcaagctcacccattcatttctcagagtgtcttagtctgaggggctcactaaaggtaatcttcatgtctgttacaatggttttcaattgctaggatttccttttgattccttcttacagtttgcatctctctgcttacattacccatctgttcttgcatgttgtctactttttccaagatgcttctccttctgtgggcttccctaagaactccttcttaaatagagtctgtgccttgcagttttctctgttgtaatctactgttattgaccagagccccattagtgtggcagtgaggtacagtggggagggaagcattctataatcttattattaaatactatttttctagtgggcttgaggccttggactgtgatcttcagaagcacttcttagcctttcaaaaatcctgccttactgagacagacaggctatagagggactggagctggccaattgcctctccccaaggtccaacaagactctagtaagtagtttttcttggagtgcaggtgtttattatggaaaatgtggtgcttacttttctcctccccttgcccaaaaacctgagatttttccccattcttcactgagagaatttgatagggtttctggaggtaaaattcacgaaagtgtgggggcccatctaagattgggcccctaggagtttttaactcacaagttagcccacactaagcctccagcaattcatcaaaattataaaaaataaaagtttttaccagtttataactccagtggcttctgcttcaagtaagctaatcttggctgtaattttatgtatttttctttctcgggattttggggtgtcagttacctttctatcttcagttctctgatggatctaagaaaagttgattttcagtttgttgaatgattttgttgttgtgaagatgggaatgaaggcttccgagctctttatatgccagagctaaaatgagaatattatcattttcatccaactcaaataaccacaaacgttacaagctctaagatgatatttgctgtttcatagttaaagtatcttcacagctagacttggctttattatgttgtttatgatgtctgacataaattggatccaggagagtccagtctagatgtcactgtgtggccttgggtgattgagtgtgactgggagggtgagttagtttctggtgagccagtatctatgatgctgtatcttggtcagctggggctgctataacaaaatatcatagactaagtgacttgactaagagactttatttttcacaattctggaggctgggaagttaaagtgctggcacattcagttcttggtgagggccccgttggcttgcaaatgggttacatcctgctgtgtcctcacatggcctttgcttggtggttgtgtaaacatggagacccctccttcctcttttttaataagtgcactgaccccatcataagggtatcacccttatgacctaatctaaaaccagttacctccccaaagtcccacctcctaacgtcatcacactaggggttagggtttcaccatagtaattttgggaggacatattcagcctataacatgttgtgtcatggtgagactggcaatgctagatttcgtgatttcctaaaaaataaaataaaaataaaaaactaagcacctactatgtgctgttttagtcactgagaatataaccctgaacaggacggaagctgtgtgccttcttggaaccctccttccagcagggagagataaaatggggtggggggaggtgaggggcgtaccgtatatcagagagcagtaactagtaggcatgaaataaaacaggttccacacgcgcaccatcagaaagtcacaagtgtgcaaagcagacaaatcccaatctcctcacttttctatcgcgtaggccccgcccgcgccccaagccccgccctgtcatggttttcctctccagagggtagccgctacgccttaccgactgcgtttcagtgctgtcccactgctcctgcacaccccacgcctgcgaccctacccaccacggacaggcgctcctgcgagctggaagccagttctctgcgtcctgagcctggcagctgcatctgaacactcggagcctggcgatggcttccagaaacccctgcgccgtgggtcgcttcagtgaaggggcctgtacttcggcgacccagactccgggctgagaggcctcctaatccaaccaggaggaccaggagaggcccaaaaggggacacagggcagtgaccgccaggcttggagaggagccgctcctggcaaagccagcgccctatttctgaacgccgcctccgttccggactacacttcccaggggctattgcagcggaggacacgcccacttccggaaaggacccaaagccgggcgagtgcacgtcccgccggttgctgaggagaagggaggtctgggcggggcagcggccgaggctggactggggcgcggcgggggcggtgtcctggttcctgtgtgggcggcgggcgtgagcgtgcgcgtgtggcctggtggctgtgagtgcccatacgtggtgagcgtgcggtgctgtgctgaggaggggcgagcgcgcgcggggatggcggcccggtgtgtgactgtccggtgcgtggccgcgaatctgcgcctgcgtgcatggcccggcggcgtgcggaaggcggtgtgtgttggaatgagtgaagcactttaagtggccaagagcaggaaacccggccggaggaggcttaccccgttctcccctgtatcgactgcgtagagcccagtgtgggcaaagtcctagagcccggggaagttgcccgggcggggcagcctcggctgaagcatttcctgtcagccctatctggaaggggcagagcccaggacagggctccatgtccacaggacggcgaggagcgaagaccatggggactgagtacacaggtaagagtgacagatgacggatgtggctgccggagtggacattgaggttttgggtgctgtctttcggggttcaggtgctggaggaggatgtcccccgtttctaaggctagtggacctggaagtcgaaagatttggagggtcaccttgggtcagagtggagctgggtttagttagggagggaccttgacttggccagagacacctaaccagataacctgactcaggtccttggtatatcactaagggcccatgggagagaacactacccgtaatattacccattatagcattacttctgggtactctgctgctgttgaaggaatagctcagcatttagatttttacccgtcagagccttgtcccatctatcactgtaggatttgggaagaaggcgagattcacagcttcacccagaaatgccgaggcattccagcctttctatggcttaatcacgttctagtcaataacggaagatatccccattccttgggcttctctccctcccctctggcctcccactccaataaagagaaagggggaggaagggctatttttagccatattgttctgtgcttgtttagtttcctgcatgctatagtaatagctaatgtttaatgagtgtttattatgtgccagacacagttctaagaccttttgggagtatcagcaccaaacttcacaacattatgaagtaggaactacttacctcttttttacagatgaagacacagaagcatagagaggataagtaatcactagcaagtggaagaaccgggattcagatccagaacaggctgactccagagtcactggctgtcatgtagtttcctcaactactgcctcaggtaggtttcttagccacttttgacaattaaagaaactgactctgaaagggttaaataactaaatagttcatatgccagaacctccactgagcaggtttggggtttttttcttaaaaagtttatgactctaagttcttaggtaaaatggagatggtaatattatatacctcacagtactgtcataaggattaaatgacctcatacatgtaaagcacttggtatagtccctgccatgtaatgtgttcatttttatcatcattatgataatcctttgagaaggcagtggaatttagatgaaagaaactagaattaattcagatactttatcctcttccttcctaattaaggaaacatggctcagtggagtcaagggactgcttcaacactgtagtttgtcacaaaacaaaatgagatcctaggcctcatgaggattttttcatttggttgtctgcaagtcacatggactctgttgtaacgaaaggaatgcctctctctggaaaagatggaattctccatggaatttgtcttatagaatgttcacaaatcctggccaactgcacagaggacttattttctgttattttctggtatatgagcaaataacttctgtgatagagtcagccagacctaggttggtgactaggttatttacaaatttgtgtgacttgtggaaaagacttgacttcccagagctttcttgtgtaaaatggtgacaatatacccgattctgtttgaagattttggagatttaaagacagtattaatatatgcagcacagacatggtggctcatgcttgtaatcccagcactgtgggaagccaaggcaggaggattgcttgaggccaggaggttgaccagatacctaactccaggaggttgacacctcctggcctcaagcaatatagtgagcaattgggcaatatagtgagacccccatctctatcaaaagtaaaaaaactagctgggcatggtggcacatgcctgtaatcttagctacttaggaggcctaagcaggaggatcccttgagcccagagtttgaagatacagtgagctatgatcacgtcactgtactccaacctgggcaacagagtgagtccctgtcttagaaaaaaaaaatgtacacacacacaggctagtattaataaatctgttgttaatgaattggtggctgatggggagagggggtcaagagatattatgctcatcctgaaaacccagagcagaggggaaccccagctatatatttcaagtctcccaaagagcatcaggactgtggggtgggggagttggagtgaggactgtgagtgaggacagaagaagctgaagggaagaaagcattttcagactttgattattagtgctacttggtttctcactacttctttttctccccagctctacaatcccagagtaaagctcttctccaaatgaagagccaggaagaggtagaggtggcaggaattaaactttgtaaagccatgtccctggtgagttagtattccccctctccccactaaaatagttttgcttttctggatttggtaatacttgttttcttctgaaaatattgtgcttaagagttccaccctgaggcctgtttcctgtttcttccctttctgatatgtgatggggttgtgagtgagggatagactcacacagcccagtgccctctcagaggttccttctctccttcctgctcattgtttatttttcattcaggaaatgacccagtctgagcccttcccttgtgctcagtcttttcataggcatctgacaaagcagaagtacaatcctcagaggaaatttccatgcctggttcctaagtctcagtcctgattctcagagaggttataatctgctggagaaatgaaaaggcagcaaacacttacgcagtgtgagaagtgctgcaagcagagagtagactcacagtggaatacttgggaagggccattaatagcccatatgatgtctttgggtgaattagaaaaaaaagtgccccttcctctctactgatgaagctctgtaacaggccgcacaatatggcaagaggaagtctaccgtattttagctccttcctgcctccttggtgagggatccttgagcaggatatagcctgcaccatcctactcactgctgagggcaggaagggttggggggacttcacagaggaagtgattcctgagttacgccttgaatgaaatggaggaagtgcaggcatatgggattgatggcattctgaacagagtatgcaaaggtttgttctccccatttgaccatggagccgtgaacatcttaaaatgccaaggaatgttttacatcctttcttctttctaggttgaataccataatctgtttagtcagtcccttgttgttccgtaggtaaattgttgacaattatctgctgttaatagagtgttgcagtaattattcttgtagttgaatttttgccctcatctctgattattttctttgactaaattcctagtttttcattccttgtggattaaagtttctcaaactgaccctaccctagaacattttaaattttattatttttatggccaacaatagaagcttcagagctacagttcatgttctgattaagataaactgttaatctagtttcaccagcaaattgcttattgtaagaaagtattgaatttggtttacaaacttagaaaattaaaatttttaaaatggagtagttaagttttctttttgttttttgtcttttttttttttgagatggagtctcactctgttgcccaggccagagtgcagtagtgcaatcttggctcactgcaacctccacctcccaggttcaaatgattcttctgcctcagcctcccaagtagctgggattacaggcctgtgccaccacacctggctaatttttttttttttttttttttaagtagagatggggtttcaccatgttggccaggctagtctcaaactcctgacctcaagtgatctgccagctttggcctcccaaagttctggtattccaggtgtgagccactgtgcctggcaaaaattttttttttataataggcataacaacttatggccagagcatgacaccttttcttaggtataatgccatgaaacatacactaccaaggtaacttgtttcttagcgcatttggacattttaaacaaaagcattcatgtcagttgccagaggaaaatattttaagagtggcagaatttgtcataaaggttaagatggactatgcacactccactctttttcccagtgaaagttgctataaaaccaggacagcatgcctggaacagcaatctgaggtctctgtaaagtaaatagtagcaggcagactggacacagtgactcacacctgtgatcccagcactttgggaggctgaggcgggtggattacctgaggccaggagttcaagaccagcctggccaacatggtgaaaccctgtctctacaaaaaaaaaaaaaaaaaaaaaaaaaaaaaaaatatatatatatatatataaattagccaggtgtggtggtgcatgcctgtaatcccagctattcaagaggctgaggcatgagaatcacttgaacctgggaggtggaggttgccgtgagccaagattgtaccactgcactccagtctgggcaacagaacaagaccctgtctcaaaaaaaaaaaaaaaaaaagtagcagtcagattggggaaaaagccccagatttgaagtaccaccagaccatggtgcgtttaccttcaagagactcaaaacctgcaagtgggtaatgatgtggacagaaagagctgcaggagaagccttctagttgataatcaaactgctgaaaactaaagacaaaaaaatctcaaaaaccagccactgaaaaacgatgaagaactgtcaacctagaatactatgtccagggaaagtagcccttaggaatgcagataaaataaagttactcataggaaagaaaactaagaacattcactgccagaattctgcaagaatcactaaagggagttcttcagatagaaattataccagaagggaacttggagcatcagggtgaaggaagtgcaacagaaatgggaaatattatatgtaaatacaatagactgttctcttgagtttataaaaatatcttcaatggttaaaaacaaagctgatagcttaactaaacagaacagtattttaatataggtaatctagattcagagaccatgtctaaactattgtagcatactacagttaggtaaaataagatgtaagaattatgattgaaatactaaatgaaatgtttcacctgttcttcttggccttctcttcttctctctctgttttttcccttctgtccttcttcatccttatcataggcaacaattcttaagcaattacatcatgccaggcattttagatctgtttcttcatttaattttcacggtgctgccatgaagcaagtactatatttccatttttcagatgggaaaactgaggcacagggaagttaaatttggccaacctcacccagctagtcagtactacagaccaaattcattggagtaatctgaccttttttctgatttattcaaaactggtatttatttaaaagtctgatgttgatataagtgaagtcataaaaaaattgaaaatctcccagtaacagtccagtggatcactttgtgggttggttaggaaatggagctcatgtaacaaaacacaggttgcttgatatgtgctcacatcacattatttctcctgataatttcccattagattatcaaaaaacaacttttgggcatgttggctcaggcctataatcccaactctttgggaggctgaggtgggaggattgtgagaggccaggagtttgagatcagcctgggcaatatagtaagaccctgtctctacaaaatgaagaagtaaataaaaaaggaaaatgaaaaacaacttttcaaatgtgttcttctctcctaatacaaatatacttttatttcagaagaaaagactatagctaggtgtttttttcctttcattttttaggcatacctcttaacatctcaagaacactaagatttcttagaaaatattgtggagattgaaatcatgttcatcaggtcagcatccttccttgcaagtttttctcacagttccagagctctttagcttctccatgtagagaagtgatttagctcctaacatgaatagcattgcgttagcacttgattatatcctgttttgaatgtagtcagcattttttcattggtaatgtattctcgccacctagaattgcaaatgtttgaagagcaaggagtatctcatttttttctttttcctaatatgtacagcataactaggcagaaaagttgtccaataacttacctgacccggatcatttagacccttagtgcagttacttatacatagtgtttttaatcccaaagtgagaacagcataactctttaccctagagctgcattggaatgtgaacactgagtgagcaagatcatatttgtgtcattttagggttcagtgactttcacagatgtggccatagacttttcccaagatgaatgggagtggctgaatcttgctcagagaagtttgtacaagaaggtgatgttagaaaactacaggaacctagtttcagtgggtaagagtatcttcctcctgttgcctccccatgactcagtagtcttttatgccattatcagaatttcccatagttttccacagcataggcaatttttatatgtctttttacatgcaggtctttgcatttctaaaccagatgtgatctccttactggagcaagagaaagacccttgggtgataaaaggagggatgaacagaggcctgtgcccaggtaagtggaggatacctagagataaaggaactgttctcaacatgttcttgtctctgaagtgtgttggaaaacacctctcaaactccctcccaaactgaaacttgttcttctaacaccagtttttgaatggttattctcttccctactagtgtaacttgcctcctttacctttattgatttcttatgcataccagggtctatttctgagctcttgttttactgatgtttacctaattctactcaagcaccatattgttgtcatcatccctgacttcaaacatttctgaatcctttagacaagctgatgtttagttttttgaactggtttaaatattttcctttccttaaaaggtgagtttattgagttaacatgtattacagctattttcttccctctgcctttttcttttttgtatttcttgtgttatttattcttgttttgttgtttattaggtctgtttttttctcactctcttctttataccaccccaccctttgaattagaaaagtttttagttctacaagttgttacctttatgtatttatatattttaagatcttttagaatttttctgcttggtattccaaacattgtcttctgatacccttacaaaagatgaagaaattagctcatgaatattactttctttccctgtgtacatcatttccccacttatattgtgctcactgggatttttgacgcagggtatttcattcaattttttttttttttttttaattttcttgccttgctttgtagctgttttactgatttagaaagctagataagagacgacagaaatatattgcaagaaaatgaacctcaaatgagatggtcctggtttaatctgtggcctgaagcgtagacttttcctactttcagttcttcattttattttattttattttactttttaaaattagagacaggatcttgctatgttacccaggctggagttgaacttttgggctcaagcaatactcccaccacagcttcttgagtagctaggactacaggaatgcatcaccacacctggccctactttcagttcttatagtttcaacaagaggattgtgggttacttgtggtcctatgtacattaataaataagaaataatgaaaatcagtaagcatctgattcacaatattagaaaaagaacaaaatgaatttaaggaaagcccagataagttatatgtagtgatttatacgtctacaaataaaagtaggaataaatgaattagaaacagtagcgctactgaaaataaagtattgtacatacttcattagaaaaccaacacagtatataaactaaggacaaatgagagaaaacacaaaaacaaaataattataaataaccacacatgcataagaacttaaaagaatcatgtgaatctattttcctcaactctccataaaataatttgaaaaaatagatgatattctagaagaatataataatgtaggttaccataactgataccaagaggagatacaacatttaaacaagtaagttaccatcagagaaatgtagaatgttgtataggaactgcctcccccaagaaaagaagccacatccccgaatagttctttaaggaaaaatatcatcaatgttgtttaaattgttctgggatagagaataaaaagagagcttaaaacatttttgtttatgaatacagcatatccgatgataccaaaattaccaaaatagcaccaaaaagagaaattagagacaaacctcaattatcaatattggttcaaaatcttaaaaggtcatattgaaatagtataccatggccaaggaggatttattacagcagtgcaaggatggttgtatcacctaatcttatgtaagaaccataaaaacatgtacctctgcttgtgggtttcaataactatgtgattcacattttcattttcgaaatttccattattctagcatttaataaaggagacatttactttcttaatatctttcagacttggagtgtgtgtgggtgaccaaatcattatctttaaaccaggatatttatgaagaaaaattacccccggcaatcataatggaaagacttaaaagctatgaccttgaatgttcaacattagggaaaaactggaaatgtgaagacttgtttgagagggagcttgtaaaccagaagacacattttaggcaagagaccatcactcatatagatactcttattgaaaaaagagatcactctaacaaatctgggacagtttttcatctgaatacattatcttatataaaacagatttttcccatggaagagagaatatttaattttcatacagataagaaaagcttaaaaacacattcagttgtgaaaaaacacaagcaagaccgtggagaaaagaaacttttaaaatgtaatgactgtgagaaaatattcagcaaaatctcaacccttactcttcaccaaagaattcatacaggagagaaaccctatgaatgtattgaatgtggaaaggcctttagccagagtgcccaccttgctcaacatcagagaatacacacaggagaaaaaccttttgaatgtactgaatgtgggaaagccttcagccagaatgctcatcttgttcaacaccagagagttcatactggagagaaaccttatcagtgtaagcagtgtaataaagcattcagccagcttgcacaccttgctcaacatcagagggtccacactggagagaaaccctatgaatgtattgaatgtgggaaggcttttagtgattgctcatccctagctcatcatcgaaggattcacactgggaaaagaccttatgaatgtattgactgtgggaaagctttcaggcagaatgcttctcttatacgtcatcggcgatattatcatactggagagaaaccctttgactgtattgattgtgggaaggctttcactgatcacataggacttattcagcataagagaactcatactggagagagaccttacaaatgtaatgtgtgtgggaaggcttttagccatggctcatctctgacagtacatcagagaattcatacaggagagaaaccttatgaatgcaatatctgtgagaaagccttcagccatcgtgggtctcttactcttcatcagagagttcatactggagagaaaccctatgaatgtaaagaatgtgggaaagctttccggcagagcacgcatctggctcatcatcagagaattcatactggagagaaaccttatgaatgtaaggaatgcagcaaaaccttcagccagaatgcacacctcgcgcaacatcagaaaatacacactggggagaaaccttatgaatgtaaggaatgtggtaaggccttcagtcagattgcacaccttgttcagcaccagagagttcatactggtgagaagccttacgaatgtattgaatgtgggaaggcctttagtgatggctcatatcttgttcaacatcagagactccacagtggcaaaagaccgtatgaatgtcttgaatgtgggaaggcattcaggcagagggcatccttgatttgtcatcagagatgtcatactggtgagaaaccttatgaatgtaatgtttgtgggaaagcctttagccatcgtaaatcccttactctgcatcagagaattcatacaggagagaaaccttatgagtgtaaggaatgtagcaaagccttcagccaggttgcccatcttactctacataagagaattcatactggagaaaggccctatgagtgtaaagaatgtggaaaagccttcaggcagagtgtacatcttgctcatcatcagcgaattcataccggagagtcatcagttattctctcctctgccctcccataccaccaagtcctatagattcaatctcgtaaatgcttctagcatccatctgcttttttccagcacatgtcccatcatcatagtccaagacgcaaccatctcatctggatttctgcagtagcataactgttgccccttttgcttctatcaactacatgtttaacactgtaggcagcctaaccttttaaaaataaaaatacataatttatgttattttcccatttaaaacacttgatttgaaaaatatattaactaatccatttcaaggatttagcacacactggcatatagttattgctaaataaatgctagccattaaggtaaaggtttccttacaaactatcatattaagcagcaagtaaaccaaacagtaagtctaagactaagattttagagcagacagaagactactctcctggtagagaggaaagatgaacaaactcagaattgaaagatttatggtacacaaggtaacatggtggcttatcactccctctgtgacattgttgatgagcaactctcactttacctgacactgagaagtgagaatcagccaattagaacaaaagcttttagctgggtgcggtggctcatgcctgtagtcccagcactttgggaggctgaggcaggcagattgcttgagctcaggagttcgagaccaacctgagcaacatggtgaaaccctgtctctacaaaaaatacagaaattagccaggcgtggtggtgcacacctgtagtcctagctactcaggaggctgaagcaggaggattgcttgagcccaggaggtagaggttgcagtgagtcatgatcacaccactgcaattccagctgggcagcagagccagacactgtctcaaggaaaaacaaagaacaaaagcatttggtagaatgtaggactaaccagggtaggtagtagtaaaccaaaagtaacaagccaaaaaaacttgaatagattaatagccatgaaacactgaaaagggtagttcaatactttggcctttataaaagtaccacagacaattcgtgtggtatttaaattgttctagcataaaataaaatgcaataagaccttccatcttgttccatgagattgacaagacatgccaaaacataaaaatatgtacactgcaattagtttctgaatgtagatgttacaacttaaacttatttttaaaatatttaaaaataggaaggctagacatgcctctgtatagaaaatctgataaaaatatttctccctaaattgtaaattcattgatattccagtaaaaatttccatatttttttagttgagaagctgattctgatcatctgtagaattttgattttaacgaggaatgtagtttacattaggaatgtagtactaatactaattgaacatttgctaatgtttcacacactattttaggtgctgggggatacagtaaggtacaagatggacaaaaatacgtgctcttacagatctagtagaacagaaaaaattaaatgcatgctatgtgataagtatatgatatgtcccataaagagaaatgatataaaaaagaagctagggagtgctggatcaggcaccttactatccccagaacatgttggtattagaggatgagggaagaactagaggtaactgtgagacacaaaaggcataatgaaaatagtcatgatagtcccaaggcagatattgtttatgatgctttgagtgttggaggaagggaggattgatggtttaacagagatcatggcagttatgttcactcatataaatgttgatttagaagctggtggaagggtattttttgagtgacagctttattgagacaaagcaattctggagaacacccatatccttctctctgtatccatcagcagaagtgaagagggagccccaaagttccacttaaagtgtacaacttatggcttttagttcattcacggagttgtgcaaccatcaccaccatcaattttagaacattttcatcacctcaaagaggaatcccttgtccttttgtagttatggccatccctggaagagtacttttttttttttttcaactgaagcacccagagctcttgggttccctcttaactgctttctgtggaagtatagagggccatgtgagggaagccgttatccagagtacatgactgctagaaaatggagtttggggctccctcttcacttctgctgatagaagcataatggctaggggatgggtagtctcaccagagaatgtggagctttcagactctccttatatatgataaaaaggatttttcattgtagtggggaaaaggtggtttgatcaaatggcattgggaaacttagctcactggaaaaacagatctgtacctttcacactaatgaaatgcctgagatattaaaggtctaaatgtaaaattaaagtacatgaaaaacagaataatatatatgtaccctcggtttgaaatagactttaagcactaatgcataaccccaaagctgacattaggcttttatatggtggaaaacatcatagtcaatagataaatgagagactgacacaaagtgtttgcaacagatataataaaggactgtaattcgtgatattcaaagtactattacaaaccaataataatctgcaacttagaaaaatggactaatgtcccattcacaaaagatgcaataaaagcagttaatgaaaattatccaatatcactagaaatcaagaaatgcaaattaaagtgattatctactttttccccaaaagactgactaatcgagtgataacattcagtattggtgaatgtgtggaaacaagggaattccattgttgattacatatctattgctttatgtatataccctttgaattaatattccttggaaaccaacatatacaaaggtagataaatgtattagtggcaaaaaaattaatggtaaactattaaaacaacaagtgtccatcagggtaataaataaattaattatggtatatatccattcaataggaattatgcagctgttgaaaaaaaatcaatgtgtgtagtcatagaaagatagctgtgctatactaaatgaaaaattgcagacctgtattgtagtataggcccataattgtgatatcaaaaataaaaatcaaaatatatattatagtaggcatttgtttttctctgcccagtttcccttgcctcctccttttggctgcactatctcatcttttccttttgagtaactggccataccctaccatatgtttttgatggacgtggccaataaaattgtctctgaatttcaaaaggcatttggatctgtgtcatccaatggcaactccctaaaagctgatgcagttattcttttgattggtccttggaaccaccctggtttttgtactttccaagtctgtgattcctcaaactacccattgtctttccggtacttgatttttgcctcctgttggtcagttgcttgcaagtaaagaaacaatcatacagaatttggtacgaagattgggtaatgggcattagaatctttggaaaaatcaggtattgggagttgctttttggatgagatggggcgaataagacttatattctagactggaaagcatctcatggtgtgcgatgagcaaacgcctgattattcattatagtcacctgggatgaatagaggtctagggttctggataatgataatttaaggaggatggagaatgctgaatccaaaaggtatatgtaatactggtatctaactgcttggaataacttaaagtttagctcttgaatttctagcattaaggcaaaaaaaattcacctaagggattttgtatgatattgttgaaagatgtcttacattgtttaaagtcatagggttaagatggctcataaccaaatttagagactatttttatgcattgttaaagtggaatgctggttaaattttatactttattcacaagagtcactgtgaattgaattgtgaattcagttctgaattgtgttcccaccagcaccaccaaatgctggcctctaccaccaccaaatttacttgttgaagtcctaaaccccaacatgactgtatttggacataaggcctttaagaaactaaggttaagttaggccataagagtgaggccctaatcccataggactagtgtccttataagaggaagagacaccagaggtttgtctctccacatgtgcacagaggaaatgctgtgtaaggacacaacaagaatgctgccatctgcaagccaggaggagagacctcaccaggaaccagccctgccagcaccttgatcttggacttttaatctccaggactgtgagaaaataaatgttggttgtttaagccacccagtctgtggtatattgttacggcagcctgaactgattaatgcaattaccatataatttattgttcaaactgggacatttttgagagtgaaaggagtagctaactgcacagggcacttgacaacaggtgttcatatcctcagcaaagcaggatatatggtcatacttcttgtgtaacagaatattgaacagaaaaaaatatagctctactattggaaaggtgatattggagatgagccaaaggattggaatatactgaacttccggattcgtgtgatataccacctattaacatctgtttgcataggtacatatggctgttctgaagagacagctaacagttcatcttattcccccattccattgttgctcacatggaataacaaagtgaatttaacatgaccataacattaaatgcaaaaatcaggctgagcacagtggctcatgcctgtaatcctagcactttgggaggcccaggcaggaggatcatttgagaccagcctgggcaatgtagcatgaccctatcccatatctaaaaaaaaattaaattttccagtcatggtggcacctagctactcgggaggctgaggtgggaggattgcttgagcccaggagttcgaggctgcagtgagccatgatcacaccattgcaatccagcttgggtgacaaagccagaccctgtttgaaaaatagataaataaaatcatacatatgtacaaaattaaaatagggcaaagagtaactgtatcttagaagaattttcggcagttagtttactagtgtagattaagaaaaatctagggcatttgtggaagtgaaatttgaggaggctgaatatattgacaaagtagcttgagtagcctgccatggttctaagaatttgttgaactcatccatgtaccaaatgctggccgctaataaattacattataaggccagaaatctcttaacataatgtaaaggatgttgttcagacttcaaaaggcaggattgctggattggttcttgtgttgcaacatcaggtctcctgacaagagtccagaaacctatacattcattcttcccgtgagaaaaacaccatttgtctaatggattttaaaaccattacaccgactctctggcagatcaagaatgctatgtagagaggttgtaactgaaggagcatctctgatcaaaagactaattgaaatgggaatgacaccaaactgccccaccaggtgagcctcctctgggactaatgtgacttcagagagagcctttaactcagcatggcctgagagtccttgggcagattggggccttggggaggttttttggggctcctggtggcagaagcaaagaacaatttaaaaataaggtttaaaaaattctacctacaatagcatcaaaaggaattaaatacttaggaatcaacaaaagtacaaaagttagattctgaaaactataaaatattgttgaaagaaaatcccatatttatgcattggaaggcttaatattattaagatggcaatgcttcccaacattatctacatgttcaatgcaatctaatttcctttttgtgggaattgataagctgatcctaaaattcatatggaagcacaagggactcagaatagccaaaacaatatttaaaaagcaaaacaaagctggagagtcacactttccaattttaaatcaaaactgtagtaaccaagactatgcagtactggcataaggatagttatagagatcaatggaatagaaattaaggtccagaaataaacccatacatttatgctcaattgattttcaacaaggatgtcaaaacaatttaatgtgggataagaagagttgtttcagccgggcgcggtgactcacgcctgtgatcctagaactttgggaggctgaggcaggtggattgcctgagctcaggagtttgagaccagcctggagaatatggtgaaacccagtctctactaaaaatgcaaaaaattagccggctgtggtggcgtgcacctgtaatcccagctactcgggaggctgagacaggagaattgcttgaactcgggaggcagaggttgcagtgagccgagatcgcgccattgcactccagcctgggtgacagagtgagactctgtctcaaaaaaaaaaaaaaaggaaagtcatttcaacaaataatggtgggatcactggatatctacttgcaaaagaatgaatttggggctgggcgcagtggctcacgcctgtaatcccagcactttgagaggccgtggcgggcggatcatgaggtcagattgagaccatcctggctaacacggtgaaattccgtctctactaaaaatacaaaaaattggccgggtgtagtggtgcgtgcctgtaataccagctactcgggaggctgaggcaggagaatggcatgaacctgggaggcagagcttgcagtgagccaagattgtgccgctgcattccagcctgggcgacagagcaagactgtctcaaaaaaaaaaaaaaaaaaaagaaagattgaatttggacccctacctcacactatatatgaaaatgaatgcaaatagatcaaatatctaaatgcaataaccgaaatcgtaaaactcttagaagaaacatagtggtatatattcatgaccttggatttggaaatagtttcatagatataactgtcaaagtacaagcaacaaaagcaaaacaagttggactattatcagaattaaaaacatctatgcttcaaggctgggcatggtacctcatgcctgtaatcccaggaatttgggaggctaaggtgagaggatcacttgaggaaaagtttgagactagcctgggcaacatagtgagatctagtctctacaaaaaaaaaaaaattaatagatgagttggtgcatgcctgtaatcccagctactcgagaggctgaggtgagaagattgcttgagcctgggagatcaaggcttcagtgagctgtgatcgcaccaccacacatcagcccaggtgacagagcaagacactgtcttaaaaacaaaaaaacaaaaaaatctatgcttcagaagacaccatcgagaaagtgaaacaattcacaaaatgagagaagatatttgcaaatcatttatctgtaaaggacatgaatccagaattacaacttaacaataacaagacaaataacccaattaaaaataggcaaaaggtttgaatagacatttatccaaagaaaatatatgaatgaaaaacaagtatatgaaaagatgctcaacatcactcgccattagggaaatgtgtatcaaaaccacgatgatctgccccctgaaagggccagacaggggaaggaatgctgcggtggggttttgtcatcctgaggatggataggtgacagagccttcccaatgttctcactctccaatgacagctggaaatgcagtgttttgttttgtgaaaatgaaggcagatgagtcatgagaagaatgggctaaaaatcctgtaacgtgtgcgcacatatttattccatctttattttgttctaacaaaacaccttgtataaaggaaccagccacgtattcctttgttcccactgaaagagttttttctttattaaaaagaagtgcacacatattgatctactttaagcacacacacatcgatctttacattcaatgtaattcaaaaaaaatcaaagtaagatttttaattgacgattgtagactgattctgttaccacaactggactgggagttctttggctctcatgtaagtagaaattaacatcatgccaaacagaaattttctcaggcaaggtttaagaggcttgaagctcaagctatgcaaagtcacttccacatttttcggtatcttttcagcagcaccccactctactggtaccaatttactgtattagtctgttttcatgctgctgataaaggcatacccaagactggggagaaaaagaggtttaattagatttacagtaccacatggctgaggagacctcagaatcatggtgggaggtgaaaggcacttcttacatggtggcggcaagagaaaatgtgaaagaagcaaaagcggaacccccgataaacccatcagttcttgtgagacttattcactatcacgagaatagcatgggaaagaccatgccccatgattcagttacctccctctgggtccttcccacaacacgtgggaatcctgggaggtacaattcaagttgagctttggttggggacacagccaaaccatatcactatcctttgggaaacataaagttaggttgccaactttatagcacttcccagtttaaattgtaggaggacaagttcccttttttttttttttgagatggagtctcgctctgtcacccaggctggagtgcagtggcgcgatctcagctcactgcaagccccacctcccgggttcatgccattctcctgcctcagccttccgagtagctgggactacaggcgcccaccaccatgcccggctaattttttgtatttttagtagagatggggtttcactgtgtaagccaggatggtctcgatctccttgccttatgatccacccacctcgccctcccaaagtgctgggattacaggcgtgagccaccaggcctggccgacaagttcccatttcttactaaagagaagtcttggcaataactgaacaatgtctctggcagtttaccccagaaggacaaactttgacttttacaggaagctggccaggagtgacataggagccatctgttaagttgaaggaattgacatttctagatcacggtggaaaaactcccaccacccacccaatgtggccttcacactgacatgtttgttgtgttccttgtatccaaggagcctggaactcagaatgcatgtacctcatggaacattaaggaacagtcttcataagggcataagggctgctgtccttgtgactaagcactattaatacagtgcccaaacagggacagtctgagttacacgcaatttagagtcactcaaattgatccctcagtttttgattaatagcatattggtgttttaaataaagtattttcagaagagtacaaagggctttaattaaatctgagtaattttaaaggaaatatatgatcaaaaaagaggaaaaatgtgcctcaaaatagacataaatggcttaaatgaatgctaaaactgaaaatcaaaataatttagaatgcacatactaatttggaaacaggtaaaacagacataagagttttatttgtagggggagggtctgtaaagttaattatgtgaacttctgcgttgtaactatgtatttttacaatctactctttgactatttccttctttggggaacaatgatttagatatcctgaaaatgccacatcagtaagttgaacaagaagaacgggagctttaagaacaagattcaagatgaaacaacacaagtgttgaatattttataaatagctaaaggcagaaaacgttgccaattatctcagacttccagaaagtgaaaacaaacaaacaaacaaactaaagtcttaattgaaaagaagaaagaaagacatgaagaaagaaatagagaatgcatgttgagagtggggacaggtaagtaccagctggactcttaccctgggctgttggtcctgaggatgcggtataggttcagcctaggcactggctccaccccttgaaatagtttggatatttgtccctgcccaaaatctcatgttagattgtaatccccagtgctggagatggggcctggtgggaggtgtttggatcatggggcaggtccctcatggcacggtgctgtcttctcgataatgagtgagttcttgtgagattaggtcctttaaaaatgtgtggcacatttcgccccttctgtcttgctcatgtgtttttgccatgtgatgtgcggctcccctttcaccttttgccatgattgtaagcctcctgtggcctccccagaagtcaagcaaatgccaatgtcatgtttgctgtacagcctgcagaactgtgagccaattaaacctcttttccttataaattaccaggtatttctttacagtaatgcaagaatggcctaatacactcctcaaggacctcatctctgagagatcacacagttcttaaatcagaggggcagttcgttgctgaatccaggaagacaggccccaggtccaggttctggaatgagtcctggaggcagtaaagggtctgcttgcctggtggggaatattcagagggcatcactgaggagggggcccactctctgagcaggtgaggaccagcagccagagctcccaccagcccacaggggcaaggagggaggccaccttgggcaaaggagatgaaggaaaaggaggtgagggtgctgaatgaaggctgcggtcctgtcctctgcctcacccccaaaacccagaggtcagcctccagcccctcacactccacagagaggccttgggaggcttgatggaaacccactgagtactgagctccaggtcccaggagagcttatagccacccccaagtcaccaccacctgctgctctggtaggggccctggcttctgcctccaggaacccctaacaagcctcctcaaggcccccaacaacctgcgcaaggactctcgggaaatgctgagttaaaggctctctgaggtcacactagtcccagaggaggctcacctgtcaggggaggttggtgccatggtctggaggctctgggttgaggatgagcattggagttgtggggcccagggaggccaggcaagcccccattcaggaggaggtagagactgaacccccctcacagacccaggaaacaaagaccaccatccttgggtgtccaagttccgggatctctggatcacggacattcagctgctggctcagaggcgggaggagagaggggcagagaccagaactcagagaggacttcaggggatcccccaagactgcccccttttcaaatctgagcctgctcctgcccgctcactgggagaggtgagagggtcccattccagctcagctcgtggagtgagaggcccacactccatcccttgtgccctccctagaaccaattccgtacctggcacatgcactgacagcccgttaattcagtcacatcatctgacagtaggtcctctctttacctgaacgtagcacctccctgtatcccccatctaggcatctctgatgctcagggagcagttataggtttgggggtgccccaggaaggcaaatgggctctgggtctcctcctacattttgtggggagggtcattgtggccactggatcattcaaattaaaaacgtggactcggcacccctgagctggaaaaacgtcagacaggacattctgggggaggttagaggcacagggcatcaggacacacaggccctcctgcacctacactgaattccttcactcacagctggaatcgtggatcctgagccaggcactctggaagaaacatctggggaggaatagctgtggttggttccaaaggaccaacaacctggggccccaacaacccctcccttctgaacctcccttgggatcactcacactccctgcatccccacacacacataaagcagaggccacagcagcagctcagtggcatctctatgctggagaaccaggcccacccccataccatccagttcctcttttggggaagaaagaggaaaagccccactggaagccactgggaagggtcaggatggcgattgaacccagaagggaaacttcagatacacagtccttggaaatcaaagaagatctaaataaattgagagagattccatgttcatgggtaggatgacttggtattgttcagatgtcagtgcttcctaactaatctatagactcaaccaatcccaatcaaaatcccagcaagttattctgtggatattgagaaagtgattataaagtttatatgaaaagacaaacatgctcagaatagccaacacaatactagagaagaacagagttggagagcggatactactcgacttcaagacagagctattgtaatcaagacagtgtagtgttgcctaaagaatagagaaggagcaatggaccagaatagagatcccagaaatagaaccacatgaatatagtcagctgatctttgtcaaagaagcaaaggcaacttaatggggaaagaacagtcttttcaacaaacagtgctggaacaatgggatgtccacatggaaaaaacagacacatttttcacaaaattaacttaaaatggatcatagatttaaatgtaaaaatgcaaaattataaaactcctagaaagtaacaggagaaaatctaggtgacctttggtttagcaatgagtttttaaatacaagattgaaaagcacaatccaaaataatttaaaaaaagaaaaaaaaagcacaatacatgaaagaaaaaaatttataagttgttcattaaaattaaaaactactctgtgggccgggtgcagtggctcacacctgtagtcccagaactttgggaggctggaggcgggtggattacctgaggccaggagttcgagaccagcctggccaacatggtgaaaccctatctctactaaaaatacaaaaaattagccaggtgtggtagcaggtgcctgtaatcccagctactcgggaggctgaggtgaaagaatcgcttgaacccgggaggtggaggttgcagtgagttgagatcgtgccactgcacttcagcctgagcgacagagggagactctgtctcaaaacacaacaaaacaaaaaacaaacaaaaacttctctgtgaaaaaatactgttagacttaaaagacaaaccaccattgggaggacatgttttcaaaacacatagctgctaaaggacttacatacaaaatatacaaagatctcataaaactcaacaataagaaagcaatgcacttgaaaaatgggcaaaagatctaacaaaaactgcaaagaggatatacagatggtaaataagcatggaaaaagatgcttaccatcatattaccatcatatgtcattagggaattgcaaattaaagcaacaagatatgactacacacttattagaatgactaaaatccaaaaagaactttcaatatcaaatggtggcaagattgtggacagcagttctcattcattgctgtgggtatgcactttggaaaacagtttggtgatttcttacaaagctaaacatacccttgccatatgatctagcaatcacactcctgggtatctggctaggatttggaaaaactgctctcataaattgatgccaggaatgtaaaatggtacagccactctggaaaacagtttgacagtttgttaagaagaaaactaaacatactatatgacctagtaattacattactgagcatttatcccagagaaatgaagagttatgttcacacaaaatcctgtaataagaaaacaattaccagtgggaagaggcagcttactaattgggaggaaatatttgcaaaccatatatctgataaggggttaatattcaaaatatataaggaactccttcagctcaattacactaaaaaacaaattacccgatttaaaaatgggcaaatgacttaagtagacattttcccaaagaagacatatagatagccaacaagtatatgaaatgatgctcaaacatcactgattatcagggaaatgcaaatcaaaaccacagcaagatattacttcatcccagttacaatggctattctcaaaaaaaaacaaacaaacataacgtgttaggctgtggagaaattggaacccttgtttactgttggtgggaatgcaaagtagtggtgcttcttggaaaacagtttggagattcctcaagaaattagaagtagaactaccatatattcctgcaatccccatctgggtatatggccaaggaattgaaactaggatctcaaggagatctccaggaggttgcaatgaataatgcacttccatgttcattacagcattatttacaatagccaagagatgaagacaatgtacatgtccattgacagatggacagataaaaaaagtgacacacacagacacatacacacacaatggcatatttttaagccctagaaaaagaaatcctgtcatatgcgacaacatggataaactttgagtacattatgctaagtaaaagaagccagtcacaggacaaatactttatgattccacttacatgtggaatctaaaatagtcaacctcatagaaacagaaattagaatggtggtttccaggggctgggggaggtgagaagacgttactcaacgagtataaagtttctgttatgcaagataattaagttctctctatacagcaacttgaatatatctccagagaattgtgctgaatgaaaaaagccaattccaccattcacatactgtatgattccatttgtataacattcttgaaatgacacaattgtatatatggaggatagactaatgatcgagtctggaggaaagtgagtgtggctataaaagggcaagatgaaggatccttgtggaaatatcggaagagatccttgtgatggaaatgttctgtctcttgaatggaccgacgtcagtatcctacttgtgatattgcaagatgttgcccttgggtgaaattacctaagagacataggtctctctgtatgatttctatattatgttttacaacctgacgtgaataaatccacatttatctcagaataaaatatttcatttaaatacatcattaatcaccacctaaggctagctgctgttgatggttttgtggccacttggacattcagcaaatgtttttaaacttggctttgtggtttactatagaaaagggtctcagccaggcatctggttcctacctttcctcttgtgtaagctcccctgtctgtattacccaactaatctggaaagtagcttggctgtgaagattgtttataaatcataaaatgtggagaccaggggtcagaacaaaggaaactcacaacaaggattaatgctttttttcttatatctaaagatatagggaattgacatttaaagatctagttgttttttatttgcaattctagaatccagccacacctccttctataaaatagaactagtgttctggtgatccaagcagaggaatatggcttcatacacagaaacgggctgaggaaagcagaaacagagaacaagagtggatgggtcatttcaaagttactttccctatcatggttaaagcaaaggggatttcttttatcatgcctgctaaactggcctgtttgggacttggctattatctctctctttctctcctgagaggaggtcaggtaacaacttagttggagttggtggcctggaacttcagcatgagtagctccatttcgatttgatctgttgggcctagtgcaggaactcagtccaaaccgatagtctcctatacattttattctacacctatgctcattttcttctttgcacatctgtatgcttaaaaagtgttctttaaagataagcatgattatcaggtttaaagttgcctgggatggtccctcaggccagtccattggctggactgcagaaatgtctgcagcagatgtgacacgcctcttttatccccctcatttctctgcctccacccatcccttgtccttttctgttttccttcctccctcctccctctccttacccattctttcctctcttcagcctgtcctgccctccccaactcgacttcctctttctttcctccttttcccacccttttcttcttccttatagtcctttccaccttctcatccccctttccaccctttcttccttctcctccttgccgtctccattctcttcctttcctgcctccctgcccctccctcctcccacccgctccctcttctttctgttggttcctctcctctctgacctgttcttttcccttagtctctccccagcccttcctccttcccctccatccttcttccaacccctcctccttctccatctcttcttcttcctccccagctctcctccccaagtccctctccatcctctctcttctccccgctcctccccatccctcctccccttccatccttcttcccacctctcctacttcttttctccctcctccccccttccctcctgtccctcctcctcgcccctcctttccctccgtctttctttccacccttcctccctccgtctcttctctctccttccctttccctgcctcctccccctcaatcctccctctcgccccagcctccttggccgcggagtcctctgtgagatggaggagctcagttggctccgctcggctccactcggctgggctcggctgaaaaaagccggggggaggtggcgcgcgcgggtttctgggaagcgtagtccggcgcagtccgcgcaggcgcactgccgtcgggcgggcctagcgggcgcggtcattgtcctggcagagcggcgagccggtgagtgtggctgcggggtcgcgcccaccctctacctgtgccgggggccggaacctggccccggggagggcgcggcctcggggagacggcgtgcaggcccaggtacggggagtgcagggctgggtgctggtccagggcgtgcgggcgcaggagagggcgtgcaggccgggaccgaggtgcgcctggagaggctgagcggccgaggagaggctgaggggaagctgaggggctaaggagaggctgactggaggctgaggggctgaggagaggccggggccagggagggagaggcgtgagtgggttggaggtaggaaagttgcatgaacacgagggccatcctggggggaaggtggcctgtgtgagagacaggcagtgcatatcatcctgaggatgaggctgtgtctttgtggatattgtgaatgtgtctgtgtgtgtgtctgtgtgggtctgtatgtgtgtgtgagacagattgtgtcgtcctgagggtatggctgtgtctctggatattgtgattgtgtgtgtgtgtttgtgtgtgtgtgtgtgtgtgtgtgtgtgtgtgtgtatgagacagagagagaaactgcgtgtcgtccagaggctgggtctgtgaatgaatgtgaatgtgtccatgtatgtccgtgtgggtcatgtgtggtagcgtgtgtgtgtgtgtgtcccacttcttcagagtcttggtctctctgtggagctgtgtctctccaggtctctgcctatgcatgtgtggtgatatctctgagtgactgcctgtgtccttgtctttggtgttgtgggtgtgtcagccttgatctctgtccatgagtgtctctgtgggagggtgccctctgggtgtccactatgtctgctctttccatgcatgtctcttggcatgagtgtagggctgtgtctttccaggggccagtcctgtctggatctttcctatctctgtgtgtccacctgtgtctagagtatttcttgatgtttgcgtgtgactctgcaggggtgggtgcgtctgggtgtgcctcttccaaagactatatgcctggacaagggagcctagcagagccactaccttctcaccctacgcttctcctagtctgcctgcccacagttccctggctttttcctgcccatagaaggctctggaggcgtaggggcctgggagtgacaggggccgggtggaggaggggaaaaggaaggctgtttcttctgcctcccacaggatcttcttaaagtgggatcagactcccaaagggtctctgtgccctactctgttctgaccaaggagaggttgatttgttcagggaatgtgtatgcagccagtgctggccatttatagatgtcccagtaactctgaggtagagaccatcatcatccttatcttacagatggggaaactgagtctcagactaagtgactcacccaaggctacctcaggcatccaggttccagagcccccacaattaaccaccagacaaatgggagatcccttttttccctttccgctcagctgacacaaggttgcaggattttccccgagggaatccccgcttggaaacaatggaaatggaagaaaggaaggaaatgccaaaaagctcagaggaagaagaatccagatctaaggccaaactgggttcaacagccactggccatactcttgggcaagtcacttccagggccgctgcatgatttttaagggtactttgccttcatgggccccttgctccattgtttttttaaagcactaaaaattacattttgttatttcattaataggaagacaaatgtaatctaggctggattagatattttcttatgattttaaaagaaattaagaccttcctatgggcccctaaaggtttcatgggccccatgctctgtgcctactgggtaagtgggctctggtcactgctgtgatctggcaaaatgggccagtgttcttgacctcacaggacaggggtgaaagagaccactatctgcaaggaatttttttttatattaaattgtgtttcaaaaatgttgatggtaatatgaagtttctacacccagggaaacaattcaaaggaagagaaagaaaaaataattaataacttctacccccttctcattcccactccatgccctccagacaccaacccagcctcattccacagccttccccaggctggaagatgctgtacagatgtgtccacatccacatgttttggtttgttttttcacaaaggggctaaaggtatgcataaaactgggtaacttgcttttctcacttagtgaaaccacagacatgtcaacagatgcagaactaactctgcttcgcagaggcgacctgatacttcatactatggagaccctaccctcgatttgattcctttagtaatgtttattaattttgttttcagggtttttttttgcctctagaaacaatgctgccataaatatctttttttcctatatgtaacttttacacggagcttttattggtgtgggcagattcccaggaacagggttgctgggttatgggatttgtgtattgccagctcactttccagaaaaatgttgagcgactcacattccctcaccagtgtgtgagagggcctgttcctttcaatcctggccagcactagaagttagctcatctgttcattcagcttgatgtctaagtgcctcctgtgtgttagacgttgtcctagatgtcggaaatacaatctgaaagtgatcatccctgctccctgggggcttctgttctcatggagggaagacagatgacaaacttgaaaacaactattttaaaaaagacagttgtcaatagtggtttgtactgcaagaaaatagagggggagagagttgctgcttgaggtcaggtgattgggggtagaggacttctccaaggaggtgacgttggagctgaccaggaagcaggggtagtcatgggaagagcattccctccagagggaacagcagatgcagaggccaggaggcctggggccaagcatgggagaggggagtagaggagatggaaggggagaggccatcaggggcacatcataagggctatgtgggcagcagtgaagactttgagtgatttctaatggtgggggaagccaacgaagagttttgaagagttttagcccagaggacattttcactgagtgattacagttggccaggtgtggtgcccgggtacaggcattaagtggtaggaacccccagcccacacctttgtgatccttttgttctacaacagggcttctcaacctccacactactgacctttgggcctgatcattctttgttgtggggcctgtcgcgtgcatcgtacagtgtgtagcagcatccccagtctctaccaactaaacgcccatagcactcccctgccaaattatgacagtttggcaaatgtctctagacgttgacaaatgtctccgggggcagaattgttcccgattgagttccaaaggcttctgccaacttggccttatatatatgcccccctacaattaaaattacttttcacttgtggaagttggggccatttggcctaagaaaggctcttctttgtcttagtggttcttacgctttaagacgtgtcagaatcacctgggaaacttgcttagaaataccgattcaggggccctacccaggtagtttgattcagaggatctgaggtggggggcaggaatatatattctgagtgagattttaataagcatccccagtgattctggtactttgagaattggtgcaccagctacaagagcattgtgttggagaggattgaggcttttctgggtgatcttgaagggttggagatgtagagaggcatgtttctgtttatagcagaagaaaaactcatttccagtcagaggtgttggtggcacgggtagtgagcccccatcacgggagaagccaggactgagccagcatgtctcagactccaagaatttgtcctcatctgtgtcatggatcctatttttttactttgccatttacttgatttggctcactgattttttttttgtttttaatttaaatcaacttagtttaaaagggtattctgtgtgactgctgtaaaagaagctgagttttgctgtaagaagggaaacaaactttaaaacaaattgaagtaaagccaggtagttctaatgagatattatggtcaccctaactttggggcctgaaccctgcttttctttttaattttaatttttaatttttctgggtgtgtagtgggtttatatatttatggagtacatgagatattttgatacgggcatacaatgtgtaataatcacatcaggataaatggggtatctgtcacctcaaggatttatcctttgtgttacaaacaatctgattacatttttagtgttttgtttttttttttttttgagatggagtctcgctctgtcacccaggctggagtgcagtgttgccatctcagctcactgcaagctccgcctcctgggttcatgccattctccttcctcagcctcccgagtagctgggattacaggcacctgccaccacacccggctaattttttgtatttttggtagagacggggtttcaccgtggtcttgatctcctgacctcgtgatccgcccgcctcggcctcccaaagtgctgggattacaggcatgagccactgcgcccggccagttatttttaaatgtatcattaaattattattgatcatagtcaccctgttgtgctgtcaaatagtaggtcttattcattctttgtgtgtgtgtttttttgtttttttggggtttgttttttttttttttttttgagatggagtctcgctctgttgccaggctggagtgcagtggtgcaatcttggctcactgcaaccctctgtatttttttttttttttttttttttgagacggagtctcgctctgtcgcccaggtcggactgcggactgcagtggcgcaatctcggctcactgcaagctccgcttcccgggttcacgccattctcctgcctcagcctcccgagtagctgggactacaggcgcccgccaccgcgcccggctaattttttgtatttttagtagagacggggtttcaccttgttagccaggatggtctcgatctcctgacctcatgatccacccgcctcggcctcccaaagtgctgggattacaggcgtgagccaccgcgcccggccctctgtatttttttaataccaattagccatccccacattccccccacccttccactacccttcccagcctcaggtttcttcatcattctagtctctatctccatgagtttgttttaatttttagctcacacaagtgagaacttgcaaagtttgtctttctatgcctggcttatttcacttaacataatgacctccagttttatccatgttgttgcaaatcacaggatcttattctcctgcttttcttttgtttcaaggggcgagtgatgggttgcagggatgttaagatatctctccacttgagactttatcctgagcttgtcaggagaactggaggagaattgaatcaagatgcatttctctaggcgaatctggctctgagagcccctgggtggaagttccttacactcatatctgctagttgaacctcatggtaaccccatgaagtctgggggaagtgcccaaagaggccacaggtggttctggggcatctcagggggcctcagtccagcactcacactcaaggagggatccgggcagggccattgggagaaggcagggtgtccggtggccctcagcagcctgcgggaatgtgtgtgagtgtatgtgtgttaaccatatctataggagtgtacatgggagtgcatctgtgaggcattgtagcctggaggctaagctgtggacccagacatactctgcctgactccagtcccagctctgtaatcttgagcaagtggtttaatctcctcgggcctcagcctcctcatctgtgaaatgggtaggtagaagtagtacctaccttccaggatggttggaagatcaagtgatatacattcaagttccctacatgcagtaagccctctaaatactcactgttgatgtatgtgtatgtgtgtctatctgtctgtctctgcttgtctctcagtgggtgtgtgtctgtcctgtctacatttgtgaggccagcctaggcctggtctctcagcatgcctccctctttcttctccctacagcactgttggtcaccgcaggcctgtcttcctattcaccgtgggcagcagagggatggctgctcagctgctgactgatgaggcactggtgagtcatgttgccctgtcactctcctttccaaaggctggatcctgccttgggtgagcctctgctgctcgaaccctctccaaggcccccagtcccatcttctggggctgtgtctgccctgatgaagagggctgtgcttatagatgatgctgaccctggctgtggggtcagttgtaggggacagggaagctttggaatggccaaactagctctctggactcttaggagacacaggtgggcacctgtgggaagtggtggtttagacatgtgacattgagtgaaaacttgcgcaggaccatgctggatgtgtgacctttaaaatgggcaaacacactaaatgcttcttgtgaatgtgaatgcccacatgtgtgatgaaagtacaaaagcttatgggaatgaggcccacaaattcacccatgattttaccccaaaagataatcactctggaatgtttgagtctggctaagcaattttaatgttaaagattgctttttcatcagagatttcatcctgagcatttctccacatcattaaaaactcctttgtaacgtccatcttaatgaccccataaaagtgttgttcagtggccataccctggtttacttaatggttcctctgttgttggacctttattggtttccaagtattctttttttggttataaacagtgtcatgagggacactgggcacaaatctttctttgtgtcttatatgatttctttaggagtgattccttgaagaggaagattgggttgggtatttttgaggtattttgatattatttccacatcagttacggcggtatgtattcccaccagcatgtctgagcgggtctctgatgatttatatggctgttgtcaggcatttattctgcatgttggatatatttagattggtgcaatattgcaccatgataataaatgataaatggatataaatgacaaatgctataaaccatgatgagcctgataggggacaaatggtgccacgtgatttatttctgagtagcattgtttgtattattagtgaagttcaagtcttagaaaatgtttactagccatttctgtgggcagggaaatgatccatcttgtgctttagcagtctacaggaatctgagtatgctttaaagactttacagaagcaaatgtgtgtgtgtaaatatttgtggcaaatattcttcccagatttgctttttgtttctttattttactttattttttctgtataaaagcatttcatatttttaaaatcaaatctgttggtttctcccactgtggtgtctttcttcatctttaagctgtgaaagggtttctccatccacaggtcacatagcagctatattttcttccttttcaccatttgtcatttgaatgttaacaatgaacttttgaatctacctgtaattgattttgctatataaatgtgtcagtagacttatttgggagctttggtttattctgtcttcatttgtttggtacctttgttgaggtacacatcacgtatcacaaagtgtacaattcactgattttgggtacattcatagagtcgcgttaaccatcaccacagtccatttcagaatattttcatcatcctgaaaaagagccgagtacccattggcactcatttccattttcccccatcagtccacggcccctggcaaccagtaatcagctttctgtctctatgaatttgactgttctggacatttcaaataaatggaatcatacatggtgtggtcttttgtgactggcttctttcactcagcataatatttgcaaggttcaaccatgtggtagcacatatagagcttcattcctttttttgactgaataatattccagtgtgtgtttctacatattttatttatcctttcatcagttgatggacatttgggttgtttccactttttggctattatgaataatgctgctatgaatattcatgtataagtctttgaacatatgttctcagttctcttaggtgtgtacctggaagtggaatgttgggtcatatggttaactctgttgaaccagtaaaggaaccaccagactgttttcctaagcgattgcaccatgatgccttcatttttgtctcatctgtgattcttgccttgaattcttcttttacctacattacttagaaagatttgttgattgtttttatttcaacagggttgggagttttggtttaagttttttttttttttaattactactagtgtaattacattcaatttttaaaaaaaattgagcctgtctggtttcagcgttttccctgtggtgaaatggtttgtgtcattagacaggaaaccgaaaaagatggagtactagaaaaaggggccttggacacgtacgtgcagagaactcagaggccctttgttagcacttctgtcccaacacgatgggctcccagacctggaaggctgtgttctgtgtctcagcacaaccctggtgccagtctgggcttggtgcctggagactgctcagtgaatagttgagtgaattaggtgggtgtacttagggaagacttccagaaggaattgttgtattacaattttgtaaaataaataaatataggtgtgagagggaacttttggaggtaatggatccgtttatggccttgatggtggtgatggttccacgggtgtatatgcatctgcaaactcatcaagttatgtatattattaaatatgcacagctttttatatatcagtcacacctcaatcaagtagtttaaatttttagaaaaggaggaattattagctgggctggctgaaagatacattgggccaaaaggtcaaataatatcatataaggatctacagttgtacataagatatatattaaatatcaacattaaataatagcaagagtcgacatttactgagagcttcctccatcacacgaggcactgtgtttggaccatatttgtacacatttaaccttacgaccctgtggagggggacattgttatcaggaagcctgcctctcatatgaggcttagaaagagaaagacagttgtccaaggaaacacagctcatgaggggcagagccaggattccgttgcagagtgtggttcctgagcctacactctgaaccaccagcccaactgctttctatcaaaggtgacccctcaggcagaggaggctatcttgagcccaagccccagaagggcaccctaggaccatagagggactagccagcgggggtgaggcctccccttgggattcagttggtggtggggacactcagtatgctggagagagccagtgagctctgagtgtcagtaacaatagctggcacttattgagtgcctgctgtatgctatgcattaccattctgagtgtcttacataaataagtgggcaggtggggcctgtagcaaattggagctttcttgccccatcaaagggtcagccaccactcagctccagcctagagtggccagatattctgctgtttaaagagaaactagaaattcattttcttggtaaattgtggatgtgtttttcatgtgagtaacaattaaaaacaattttgaaacccccataggagcaaaatagaaatgtgtacagctggcttcaggcccaggtacatctcatatgctctgtgtgctcagaactcccgttctttccttgtgccttgggggttgtaccactgaatcagttcagaacagcaggtccctctgtaggacacaataggtctctcattactcacatgccatgctgtgaggaagcccaagcagccacaaggaaaagtgatgtggagaaaaagagatgcccaccaaggcctcagctgtgccatccataccagctcaagagacagacttgtaaacaaagaagctagcagactactctagcccagctgccatccaactgccaccacacaagagatgccaggcacgaactgcccagctgagcccatcaaccccaaaatagtaataaattgttgtttttgagccattaagttctgagatggctgctacccagcaaaatataactggatcagaaatttaatctgtggccatggctcaagatcttcatgtggcagagtcatgcatggatgatgtgatcagccagcaataatgtgagacgtgcaggccttcatcacactagggaggaggtcgactgtcaagcaccatctctggaagtggcttcaggatcgcttgtgatctgtctggaagagaagcgccagctgggacactctgtgatatttatccaactgtcttctttataggcaaaagacgtgccatccatctcagggtctgatccaaactaaactgctccttggctgtgatgccagctagattggtattatacatggatgaggccatctaatgttggggctgagagttgaactgactaggtttaaaatgctgccactcccatctgtgtgacctcttgtgcctcagtctccccctttgtaaaagaaatgagctcataaaagtgcctacatagtagggttcttttgaagattaagtgagatggtgtgtgcagtgggcttagaacaatacctggcatgtagtatgtgcttaatgaacattagttatttttatcattatttactaatgaattagtatggaagaaacctggtgccaataccatgtctgtcttattcacagttgtatgcccagtgcctggtgcatggcaggcacttaataaatattcgtcaaatgaatacatgaaagggtgaagtatcactctgtgtgtttccaggaaccatcaatgaacatatttagaatatgttagaatatgtattagataccattgatctagaattcctgtttagggggtaaaaattcaaccatacttttctggtagcccggaaaattataaattaatcagttaaatttccgatccagttatattttgctgggtagtaaccatctcagaacttaatggctcaaaaactacaatttattactattttggggttgatgggctcagctgggcagttcgtgcctggcatctcttgtgtggtggctgttggatggcagctgggctagagtagtctgctggcttctttgctcacatgtctgtctcttgctgtggtatggatggcaccgctgaggccttggtgggcatcttttttttttccacatggattttccttgtggctgcttgggcttcctcacagcatggcatgtgagtaatgagacataatgagacacctgttgtgatgactggcttctcccagagcaagtgttccaggaggctgaggcaggagctggaagtcttctgtgatctagcctgagagtcccagaacattacctctgccagattctattggtcaagcaggtccctaaggccagcccacattcaaggatgggggaactagactccactagtgaaggatttgaggccattttcaacaagtctacccacttactattgtctaccaaagctgacttatattgaaagagacagtgaaaatgggtaatttgatccagcaaaatataactgtatcagaaatttaactggtgttttaatttacaattttctgggctaccagaaaagcatggttgaatttttaccccctaaacaggaattctagatcaatggtatctaatacgtattctgatatattctaaatatgttcattgatggttcttggaaaggtacctgcattttccttgcttgggcagcaggactgggcatttctgattcacagccctgagtatgataattgagagtatgagagttgtatgctcattttgggcaaatactcaaagcaggtagctttttatgtgtcttcctatcacatacgattgctttcttgggcctgttcaaggtaccatgtaagaaatttaaggattcagtcatttgttgtacaaacatttattgagtacctactaagtgccaggcgctgttctagggtctgaggattctgtggtggcccaggcagacacaacttcacaaccccccatgacgtagatgctgttatccccttttaacagaggaagaaactgaagcctgcagaggttaggtaattgaagatgttcactttcatacattcacatagctagaaaatggccaagccagggtttgataacaggtctttgtacttcccagacatgcccttaagacactgcactgtctttcaaaaaacaaacaaacaaacaaaaacactcacccccctgtattacttgtggctgtgtaacaagttacccccaaactcagttgcttaaagcaacaattatttactattttacacagtttctgagggtcaggaatggggcagtggcatggctgtggctcaagatcttcagtcttctcagggcttcccaggctgcagaatcccttctgagagcctcacacagtggttggtggtgggatgccttaactccttactgacattggtgggaggcttcagctgctggtcagatgggcctctccaaaggactctgcagggcagctggcttcctccaaagtgagtaatccaagggaaaaagagggagtgtgcccaggaccaaagctatgatctttataacctttttgtctttttttttccccctaaatttcttattgtgctaaaatacacataacataaaatttgccatcttaaccatttttaagtgtgcagttgagtggcattaaatgcattcctaatgtgcagcgccaccaccatccatctccagaactctttgatcttgtaaaactgaaactctgcagccattaaacaaacactttccatccccctcccctccgcccctggcagctgccattccacaagtctctataaatttgacttgatacttcatttaaatcatggaatcgtgcagtagttttacttctgtgtctggcttatttcgctgagcataatgtccccaaggttcacccttgtagcatgtgtcagaattttttttttttaaaggcggaataatatcccattgtatgcatagactgcattttgcttatccactcgtgcttacgtacacttgggttgcttccaccttttggcgattgtgaatagtgagtgtgcatataacctttccttggaagtgacaccacactaacctctgctgtatgttgttgatcacacagaatcaccctggcacagtgaaggggctacataaggctgtggataccaggaactggggatcattcggggctgtcttggaggctgccaacacacacacacacacatacacataaaacatgaaaatattcacagtgtcactcctctgatacagctgctgttcacattttgacacatttccttccatctttttcctgtgtattgttttcatgtggttgagataaaatggttatttagaattctggaaacccagaagcaactctacatggaaaagctctgcataatcttgtaatgaaaatagctatgtaattggccatgggggtaggctattatttaatgaatcccatgacatggatgttatggttgtccaaagacttgcccatataaataaaatggagtggacatctttgtgcatgaagctttgcccaatttttggattatcttgttgggatagatttccagaagtaaaatgtctgaacattttaaacacataaaatgtgtaatattaaccttttaattgaagaaacaataggtaaaacgcacctatttgaaaattagtaaactgggaaaatgaattctcccacttcccctccccatcctgaaactactggcatcacctgctcttaccagattctattttggttaagagctttattgaggtataattcacgtatcgtaaaatccatccatataaagtagacacattaatatccagtgctttttagtttatttacagttatgcaaccatcaccacaatattttagaaaatttttaccactccaaaaagaaaccccatacccattggcagtcactccccatttctctccaacccaccctcacccctaggcaaccacacatctaccttcattctattttgcctattccggacattgtatataaatgaggcatacgatatggattttgcctgtcccggacattgtgtataaatgaggcatacgatacagattttgcctgttccggacattgtccataaatgaggcatacgatatggattttgcctgttctggacattgtacataaatgagccatacgatatggattttgcctgttctggacattgtacataaatgaggcatacgatatggattttgcctgtcccggacgttgcatataaatgaggcatacgatatggattttgcctgttccggacattgtacataaatgaggcatacggtatggattttgcctgttctggacattgtacataaatgaggcatacgatatggattttgcctattccggacattgtgtacaaatgaggcatacgatatggtcttctgtgtccggcatctttcacttggtgtcatgttttccaggttccttcatgttgcagcgtgtgtcagagctgtcgtgtggacgaaccacattgtttatccattcgtcaggagatggacatttgagtcgtttccactttgggactattgcgagtaacattgctatgagcatcagtgtatagtttttgtgtggcactctgttttcatttttcttagatatctaccaagaatggaagtgctaggtcataaggtaactctgtgtttattcacttgaggaaatgccagactgtcttccaaagcagctgaaccattttacatccccaccagctgtgcattcttaccagtttcttgcattcacttccataaagaggtctgcgcctgtataagcacatatgtgtaaatttccctttattatttcctcttatggaaatgttaacaaactagacacactgttctgggcattgatctgttttttcatgtaacagtatattcgggagatcattctgcacctgcagctaaggggctgccccctttttttttgttatggctgtgtgtattccactgtggtggattcactgacctgatttatccaaacccctactgatggccatttgggatgtgttcagtctttttacttcttcatctgatactgtaataaatatccttacacatctatgtttttgcatgtgtattaatatatctgaattagtctaaagtgttcaaaagaatttgaatattagttttgatagattttgctaaatgccactccatagacattgtcccagtctgttctcctatcaggagtgtcagagaggaatgtttcagtatttgagttggagagagtatttcctttagagaggaatgttgttgcagtatttgtccttttgtgactggcatatttcatggagcagaatgtcctcaaggttcacccatgttgtagcatgtgtcagaatttctttccttattaagtctgaatgagatttcattgtatatagagaccacattttcttcttctttttgtctgttagtgtacacttgttgcttccaccttttgtctattgtgaatagtgctgttaggaacatgggtgtgcaaatacagagtgcacctgtaaaattctaaattagattctgtccctctcctgctcagaccttccaaagaatgaataagaaggagccagcttaggccagacctgaaggaagagcattttgggcagaagaaacggctagtgcaagttccctgggggatattcgaggagagaaggcaggctggcagggctggagcagagcacaaggggcagagcagttgtggggacagtgtgggggtcagaggtcagagtcaggactacatgtatgggcaccacaagttttcattacctgccgctctgggtggttcgtgagaggcagcagcctgcaaggatgaggactcgggctctggagacagcccatgaggttcaaagcctggctgtcccacgcagtagctgtgtgctttggtccaggaacctaccctgtctgtgccttggtttcttttatctctaccttccagcctccctccagtgccccctattgacagagcttcacagggagtagctgctaaggcagaaacatcacgggatcgcagagtcaaagcccgcagatctctgtgcagagtgtggaaggggggcttttggggatgaaagacaatcacttaatcacttttaaacaggcatactatattataatgttagcacctgactcgtaggtctgttttaagttaataatgactgaatcaatatgtgccagcacggtatctatttctcaaggctgctgtaaataagtaccacagactgtgcagcttaaacaaaggacatttattctgtcacagttctggaggctggaagtccctgatcaaagtatccacaggaccacgctccctctgaaggctcaagggaaggctctgttccaggcctgtctcccacctgctggcaagttccctgacttgtggcagcataactccattcttcacacagccttgtccctgtgtacatgtctctctctgtccatgtttttcctttctgaaatgcaaattaaaaccacaacaccaccttaccccagccaggatggccattattaaaaagtcaaaaaacaatagattggcgtggatgtggtgaaaagggaatgcttatacactgctgctgggaatataaattagtacaacttctttggaaaacagtattgaggtttctcaaagaactaaaagtagatctcccatttgatccagcaatctcactacttggtgtcaacgcaaaggaaaataagtatttatatcaaaaagacacctgcacgtgtatgtttattgcagcacgattcacaattgcaaatatatgcagtcaacctaagtgcccatcaaccaatgaataaggaaagtgcccatcaacccatagataaagaaaatgtgatacacacacatataatatatatgtatatcacatttatacacatacacacatacatacacacacataccatggaatactactcagccataaaaaataatgaaataatgtcttttacagcaacttagatggaactagaggccattatcataagttaagtaactcaggaatggaaaaccaaatgctgtgtgttctcacttatgagtgggagctaagcgatggatatacagaggcatactgagtgttataatagactttggaaactcagaagcgggcaaggtggcaggggggtgaggggtgaaaaactacatattgggtacaatgtacactattcaggtgatgggtgcactaaaatcccagactttaccactgtacatttcatccctgtaaccaaaaattacctgtacccctaaagctattgagattttaaaaattgaaaaacaaatttcccttttctataaggacaccagtcctgttggattagggccccctacccccactccaggatgacctcattttaactgatttcatctgcagcagccctgtttccaaataaggtcatgttcttgagaccttgaaggttgggacatcagcatatgaattggaggggctcataattcaacccataccaaccacttagagtagtacctggcacatagcagctgctgcataatgactggtgttgcctacctcatcatcaccatccacactgctccgccaggttctttcagtccacaggcttgtgacatctaccacaaagtgctgctccttccacgtggacttctctccactccccagcagtctcatctgccttttcaccttcgggtcttgatccaagctctcttccctacccagaatctcccactaaagacccaaccaccagttctcttcacagactactcaaagtcttcctgggcaccccccacagctggcattactcaggcacctggagacctttgttcataccttcatgattgattgcgtttaccaaattacgtgtctttgtctgcctctgccatgaggaactagttcttgaacattttgtgtctgtatcccagcactgggcttgctgcctggtgcttagtaggggctcagaaaagttagctgtgcccctggattccatctggggctctgcctctgctgtgctcctaatgcatttgttgattcactgggttagactcactttgccttcagttcctttccatctggttctcagatctgtgaccttctgttccagaatgtttcatatgggatttatttctctatcagagtgccaacccaatataactagacacagagaaaactgtgagtgatccctttagaactctgcatcttattgaaatcacttcagctacatcccatctgcctcccctaaatcctcttggcttttctggccattcctccacgcctctgtaaggagggccctgcgatgagcggatgtgggtttcctcttacaggaatcagtgacgttcagggatgtgactgtggacttcacccaggaggagtggcagcagctggagcctgcccagaaggacctgtacagggatgtcatgctggagaactacaggaacctggtctcactgggtaaggggcagcttcgttgagttactcatcattggcccataacttcaggaccacaaataaattaaaaaaaaaaaaagatcaacagatctgactacatggaaagttttaaaatttgctctacttgaagctaaaaataaagttgatcacgatggtatgggaaataatatttctcacgtgttttacattcaaagggtcataattatgtaagcagctcctgggaataagaaaaagactaagcgaataatagaatggaccaaacttatgagctggtgattcatagatttagaaatacacaaagttaacactttataaaagttttttaaaccttactactggagacacacaaattgaggtactagcagtttttgcccatgaagtgcacaaagatgaaaaaagaataatagcccatattatgaggctgtagaggaaaggactctcattttaggagtataaagttgggacagctcttttggaggatagcttggccttatcagtcaaatattgaaggattccatttttagagatctgtcctttagaaattctcatgtaagtatgcaaagttttccatgggaagaaaaatcaaggaaaacgacctaaatgcccagctgtctaagactgactgaacgtatcaaggcctatcgatatgttggaaaccaggcagctcttcaaagctgaggactgtttgtaggcactgccatgaaaagatgtcccacaacatactgttaggttaaaacactcacttttgtaatcagagcgtggtcctatttctttaacagcttttctggaggtattattgacctgtaattaaccacgcatatataaagtgaagagtttgatgcattttgacatagtgcatacccaggaaaccatcaccatgatcaagataaaggacatatctatcatccccaagagattcctcatcctcctttattacccctctctccccttcctcaacccccatccccagggatcccctggtctgctttatgtcactgtggttgagtttacctgctctccagttttatatacatggaatcatacagtatgtacccttttttttttggtctggctttttttggtttgacttggcattattttgagattcacccatgtcattgcatgtctcatagttcatttatttttatctctgtgtattattccactgtatgtgtatgccacaatttgttcagccattcgcctggtgatcaacatttgggtcatttccagttctgggctattacaaataaagctgctgtgaacatttgtgaacagttctttgtgtagacatttgcttttccttctgttgagtggaaagtctggatcatgtgctacatgtatatttaacttgtttaagaaactgccaacctgttttccaaagtgattgtactatttcacatttccaccagcagcgcacaagcttcattctaattgctttatcttttaaatttagcctcccttgtaggtgtgtggtctcatcactgtgcttttcatttgatactgacacttgtaggtgtgtggtctcatcactgcgcttttcatttgatactgataatcttttcctgcgcttatttgatgtttgtatattctctttggtaaagtatctgttcaagtcttttcctgtttttttttttttttctgttgggttattattgaattttgaaagttcactatgtattctttaactatctagaagtccaatgcgctatccattgcgtcacagagccagaccactatgtattcttgatacaagattttctttagatatatgccgtgcaaatattacctcccattctgtggattgtgttttcactttcttgatggcattatttctgactctaaagtttttaattttgatgtagtgcgatgtatctattttttgttgttctcgttgcctgtatttttggtggtatatctaaacaatctaactcaaagccatgaagatttattcctgtgttttattctaaggttttagtggtttagctcttcactgaggtctttgatccattttgaattaatttttgtgagtgatgtaagaacggggctcaacatcattcctttgcatgtgaatatccaggtgccccagtgcaatttgttgaagagcagaagtttttaattcaatgaagtccagtttatcaattttttttggttttggtgtcatttgtaagaaatcttggcctatcccaaggcctcagaggttttcttctgtaagttatatagttttaggttttacattttgttctttgatccatttagagttgaattcttaatatgatgtaaagtattaatccaagtttattggggtatgttggggggacaaatgtatgtccagttgtccaacaccatttgttgaaaagaccactttctccaatcgcctttgcatttttatcaaaaatcacttgtccatacaagtgtgggtccaattctgaatcctgttctgtccatctgtttgtgtgcctttgcaccaataccaagcaatgtcatcctttcagatcttgcttttatgacttgtgcccagtctagaatgacattctcctcaagatcattctgggttttctgcccaaagccccatgaatgacaaggttttacagtctgattggtaggaaaaggcactgttcccagccctgtgtcagctccggtcactgttttcaaatcctttcagatgtttttttcctgtgttgggtagtttcctgacatgcacgttttgaccaatagtctgctaaatactggagggagttccttgcaggtcttcagaacactgtgcagctcattcctctctcatctgtcctgggaactctatctgccttggtctctcagctctgtctcctcaacttggggagttggccagactgtacctcaatttacctttcctttgtcagagcctggaaacttcccaggcagttagctggggcagttgtaggacccaccttgtttgattttcttctctcagggattttgcccttcattgcctgatattcaatgtcttcacaaccattgttttatatattttgttttaggctcaagggaatcttatcctttatactctgtcttggacaaaagccccatttgggggaaaaatgtgtgtgtgcatgtacaggcgttggaggggagtctaaaatataaaccaaactgttaactctggtgagtaagattacaggagacttccattttcttttgtttttttttgttttttttgagacagtcttgctctgttgcccaagctggagtgcagtggcatgatcagagctcactgcaacctccgcctccctggttaaagcgattctcctgcctcagcctcctaagtagctaggattacaggtgcctgccaccacacccagctaattcttgtatttttagtagacatagggtttcaccatgttggccaggctggtctcaaactcctgaccaagtgatctgcctgattcagcctcccaatatgctgagattacagagacttccattttctccattactgttttggtgtttgatgttttaaaaacaagtgtgaattactttctaatcagaaacaagcatagaaagacagaaaactgaaaaagtgtgaaggacgagatttagcaatgtgaaaaaagaatgcacctacatttgtatcaaaaggaatgaatagcgttttgcacattaacggcttttggcgaaagtgccctctgcagaagcttcggatgtctcccatgacagtggccatgccgtcagacttcctgctcttttgctgacctgactagagaaaaggtgtgatcgggtagttttaatctgggtggtgtggaactgtgttttcacagctgtcgtggttaagggctgagtgtttgctgtttgcagatgatctctactgcagggttttagcctgagaaagggaggtggcttcctcccctctgtccctctgctggtatgctgcccccagctctcctgatttctccaggtcatgttcactccaggagacttccagctgtattcacaaccaagactcctggtcctctccgatagctgccagctcatattccagagcatctcagactccatcagccccagacaaaattcaccatcacccctggagacagtcttctctccaccgagtctacaccccacactaccatctgtgccagcatctgggcattgtgccacaccctgactagggtctctaaaccacaatcattctcctgcatgaagtatttctcagttcttttcctctgagatgggaaaagtgatgcatggtaatatagccactcctcaggagccacagctcgggggccacactgccagggcttgaatcctgctgtgcctcaggtgtattgtgccctcgagtacatctctgactccattcttgtatctccgtttcctcatcagcaaaatgaggatggtcataactatctactactgtatgtaactcaagtatgattgtgagggtctccagagatccgtgcaaattgttcagcactgtgccaggcgtgttgccagtgctccatactcgcttatctggtaccttctgtgtgcaggctgtgtgaggagctggggggtgagcaaggcccttgcctctagtggagctgactcctgctgggggccgataataatcagatcaagggacaggcagagaaaaattgccacaggtcactgagtgttcataaagaagtgggcaggaggaccttccttccttacgtagggtggattgggaaggctcccgtggggttgtggggaaacaggcctgaaggataaggacgtccacggcaggtccacaggacagtggatgcagaggccctgaggcaggaagaacacacggacaagagggagagcatggtgatgagaaactgggagggagggtgggcaggggacgactcaggcaggcctgctgggtgctgagggccctgaggctgctggaggtcctggcatcattctcagtaccgtagggaggtcacgggagggttgatctgactcctcagaagaccgcactcccggaggagtggaggacgcattgcaggggtgagaatggggtggggaggacagagaggagctgctgtcgcatttcaggcaaggacccgtggtggccagccggctttttgtcagtggggaccgggagatttggtctgattcaggctgtttgcgcacagcaatgcttgccagcagtcaggacggtgggagggaaagggcaagtcaggatgtctgctaagtctctctaaaacaattttttaaattttatatttaaaactgtgaaaaatatatagagaacataaaatgtaccattttaaccacttataggagtacagttcagtggccttaaggacattgatgttgttgtgcagccatcaccgccatccatccccacagctcttttcatctcccgcaaatgaaaccctatccccattaaacaccaactcccacccactcctcagcccccggcatcctctgttctaccgtctgtctctgggaatccgacctccaggtaccgcagatgagtggaatcacatggcatccatcctttcatgtctgatttattttactaagtctctttgatgggctttgcttttttaaaaaatgtttttcatggggaaagtctgaaatcccaagtttcgtatcggatgtgttaggcttgggctatccagttgagatgctgggcttttttgaacagtttggacatagcccagaaagcaggtctgggctgaaggtgtatgtttgagcagcatcagcctgtggataacgtttagatccagactcactttgtgtggctttgaaggtccagtgtgattcaggagagtggtctcaaactcaggtggcctcaggaactaccaggtggatcatttatgtggaggagggggacagctgctgccccatgcaatgtcttgttgcccataagaatgaggctccacgtggccatatcttcatgttttttatgagctagcagccacatggacagcaacttttaaatgctgggaatgagtcccctgatgcagagtctagactccacctaggctagaaatcgaggtttagaaatgaacaggatacacgtggaaggtgattgaagctgtgggcacagaggtatttagccagggagggtggatgagcagagaaagagggtctgaacccaagctccacggaatgcctgccacccaagaactaggcagcgtgtgacgtagcaacagaagcaattgtgagaccccaagtcatgtgattattgtgggctcaagtgagcggtcctgtgtgtatgaacacttagtgctgaggctgatgagagggctggggtgcgggagggctggggccagccagggcaggtgcgtgatgagctagcgggagccggagccccagccaggggagaggatcttgcagccagcaaccctggggcagccataccagagaagtggcaaaggggcaggagaaatgcccgatttttctctcatttcacttccagtttcctgcctttggccaaacacacaggaagccagtgggcaaagtcagcatcctgagcacagggcaggtcagagaagggtggagaatagaaagtgggtcgaaggagtagagaataaccaacacatgccatataaatgctagctatttattatttctttattctttttcttcttttttcaatatttatttatttatttattttttaagagacagggtctcaccctgtcacccatgctggagtgcagtgacgtgatcatagctcactgcaacctcgaattcctgggctcaagtgatcctcccacctcagcctctcaagtagctgggacaataggcatgtgccaccatgcctggctaatttttaaaaaaaaatttagtagaggcgggggtggggggtctcactatgttgcccaggctggtctcaagcaatccttgcctcagcctcccaaagtgttgggattacaggcatgagccactgtgcctggccatcttattatttctgataaaaactgttgcttgaggagcacgactggttgtggatctgcaggatgaagtgaggaggccctgcaagtcagtagccggctgcagtcattcctactcaggtttgcagagcctgccctttgctccctgcaagcccagctcactactgcagtttctctccaggagtgcctgtcatccctcttctgaagggacatttgctctccctgttcacctcctgtgttgactctgcttcataaaccacattggcctcagttccatgcctccctcctccctccctctctgatccaaggttcttctttgctaactcgctctgtgccttgggcctcattggggtcggtttcatttgctccttcctgctgtggagcttcctcactcccagcatctttaactacatgtatttgcatcttctgtttttgtttttttcagactgggagactagacctgaaatgaaagagttggatccaaagaatgacatttcggaagacaagctctccgttgttggggaggccacggggggacccacgaggaatggtgccaggggtcctggctcagaaggagtgtgggaaccaggcagctggccagagaggccgcggggagatgcaggtgcagagtgggagccattgggaattccccaggggaacaaactcttagggggctcagtacccgcatgtcatgaactgaaggcatttgccaaccaaggctgtgtcctggtcccaccacggctggacgaccccacagaaaagggggcctgtccacccgtaaggcgtggcaagaacttctccagcacttcagacctcagtaagccccccatgccctgcgaggagaagaaaacctacgactgcagcgagtgtggcaaggcctttagccgaagctcgtccctgataaagcaccaaaggatccacacgggagaaaagccgtttgagtgtgacacctgtgggaagcacttcatcgagcgctcgtccctcaccatccaccagcgggtgcacacgggcgagaagccctatgcctgcggggactgcggcaaggccttcagccagcgcatgaacctcactgtgcaccagcgcacgcacacgggcgagaagccgtatgtgtgcgacgtgtgtggcaaggccttccggaagacttcctctctcacccagcacgagcggatccacacgggggagaagccctacgcgtgcggggactgcggcaaggccttcagccagaacatgcacctcatcgtgcaccagcgcacgcacaccggggagaagccgtacgtgtgccccgagtgcgggcgagccttcagccagaacatgcacctgaccgagcaccagcgcacgcacaccggggagaagccgtacgcctgcaaggagtgcggcaaggccttcaacaagagctcctcgctcaccctgcaccagaggaaccacaccggcgagaagccctacgtgtgcggcgagtgcggcaaggccttcagccagagctcctacctcatccagcaccagcgcttccacatcggcgtgaagccgttcgagtgcagcgagtgcggcaaggccttcagcaagaactcctcgctcacgcagcaccagcgcatccacaccggcgagaagccctacgagtgctacatctgcaagaagcacttcacggggcgctcgtccctcatcgtgcaccagatcgtgcacaccggggagaagccctacgtgtgcggcgagtgcggcaaggccttcagccagagcgcctacctcatcgagcaccagcggatccacaccggcgagaagccgtacaggtgcggccagtgcgggaagtccttcatcaagaactcctccctcactgtgcaccagcggatccacacgggcgagaagccctaccgatgcggcgagtgcgggaagaccttcagccgcaacacgaacctgacgcgccacctgcggattcacacctgagcgcctctgtgcagggctctcactggcggtgcccaggacggacgccagatggctgcgcgctttgtcagcagtgctgtgagaagttctcccctggggtggggactcggggtcaggggagctcaggaatgtggggttgtggaggggctggctgatcacacatgccccctccttactgagcctcagaaagcaagcccctcggtgtctgacgtatctggggacacttcaaggttcactgtagctgagccatggccgctggtaacagacatcagggttccagactagccctcttgagtaactgtcctagagctgggacaggtcacgcctgcctccacatctctgtttcttcagcgggaaagtggagctggtggaggggagggaggagacatctccctctttgtcagatacatcctggagtccagatgcagcttgtcaccatctgcattttctccgtgggttgggagcgtgagggccttcctatccctccacccaccgtttccctgcagtgcacgctggcagccaccaagctaggaagtggcaggagtttgccggttgtttgtgaggggaaaaatttttttttcagagttagcaaataacagtaactactgctttgaatgccaaagtttcttagagtggtctgttacgttttttaaaaataaaacttttaattaagggagactatgttattttaaacagtcttctgttttggccagttgtctggtcaaaatcggcttcagtgattgtgggaggggcaagaaggaaaagaaacagcagcaggtttgatattcagaaagaaatatgcatggattcaataagtatatacatctgagcacagattatttttatagtgatttttgcagctaaatgtgaaggcaactgtcttaagtcccttcctgctgctgtaacaaaagaccttagactgggtaatttataaacaatagaaatttgtcactcatggttctggatgctgggaagtccaagatcaaggctctggcagatttggtgtctgatggggtatgttcttcataggtagtgcttgtgtcttgatgtgtgtcttcacgtggttgtaaacggcagacttcctcaggccccttataagggtgctaatcccagtcacaagggccctgacctcatgacctcccaaaggtcctccctcttcatactgttacattggggatcaagtttccaatatgtgaatacagggaagcaccaacagaccatatcagtaacttcgagtgagtttcctaaggccgactgaagctctgtttacacataagagtgttccccaaagtgcactttctctggggccttttaggccatacttttaattttgttatttgatactactggttgctaatgttctggcatttccagttgttccacactccctgacactggtgtacacaaataaataatacagaaaaaaaattatatcagcaagcacattctgcaaataagaaaaacagccactcgggcacgtataaacaaggtggaccgtttttcaaattctggcagtcaagtgggcctcagggtgggtttgattcaggctctcatcattggagccatagctgtggttctctgtgatgctctggctctcccttcatacttcttaacatcatcctcaggctggcttcccacgtgggattgtggtggtttccagcagcgagtcttgatcagacattgctttagttgcatctgttgtgggaataaatgagaatatgtatgcactgcagagaatggagtgttaaaacagtcaacaaatgttagctaatatgtacacaagattttactactctttagcagcaaaatggaggggaagaccttctaaggccctttggagagatgaaatggctcatttaaccctcacaagatcctcgaggtagggattcatgtgcatgtcgtatagataaggaatctgaggttcagtgaggcaaggtaagcttcctgagggcacacaacatggaagtggaggggacagggtgtgagctggggtccacctgggctccgaggtccgtgctccttgcctacactggactacttctagagatggacatattgaatttctcaggacttgactcctggccttggtttcctggactccccagtgtgtgaagcagagatgggatcgaggctgcaccaccaccatccccctctcccatccagagaaccagccgggccacctctcaggtccctcctgtttcttttctctgcaacccaagctgatgtggagggcattgaggctcctctggggggatgctgtggtaccaggtgggtctcacatccctggtctcccgcctcctgggcaagctccccactcagggctccacgtttccccaagaggaaccctgaggtggctggaataatggccacattgacggagtcacttgtccaactctgagggggcgctctcatcacccccactctacagatggggaaacaggctcgcagaggttcaggcacctgcccaaggtcacacagctgctggattcaaacccattctgactccagaagctggactgcagtccacggcaccactccacccaccagttcctcagtcaggtacttactgaagccaaattaaatttacccccctgaaaatgtgggtttggcagggatcaagcaggtcaggaacctgctttttaacaagtcttctatcccatacatctgtccaaggcactatttggggttatgtgctggccttcgagttcaccctcactgggccctgtgtccctgtgtccctgtgtccccaggcctgacccaagcctggccttgaggtagaggtcatgggtgctgggtggggtctgaatgacccctttatcacttggagtaaatgccaaactcctcacaaacccctgtgtgacgcagcctctcccagctcccgtcccgctccccctgctcactctgcttcagccacactgtgctttcgttcagtcccagcgctggcccagcccactcccaccgcaggggcctctcccttcctggcccagcacccacgctgagcttcctcaggtccctgatgctcagtttcacgtgtcggcctggctgggctccagtgcccagcaggcccatcgcagtgagtcccggtggtgctgagaagacactttatagatgtggatgtcacccatgtcagctgactttaagtaaacgattattatctgcaatgtgtgtgggcctcatctaatcagttgaaggccttaagagcaaaaccagtttcttggagagtaaaaaactctgcctcaggattacagtgccaactccggcctgagtttccagcctaccagcctaccttatggatttgggacttgccagctcccacagtagcatgacccggttatttaaattaaatctatttatatataaaagtatacatatgccatatgtataacaagaaatatgaggtatataaaaggatatgtataagatatatatagggtagggcatggtgacccacacctgtaatcccagcactttgggaggccaaggtgggaggattacttgagaccaggagtttgagaccagcctaggcaacatagcaagacctcatctttacaaaacgttagaaaaattagccaggtgtggtggcgtgtgcctgtggtcccagctactcaagagacggaggtgggaggattgcccgagtccaggaattagaggttgcagtgaggtatgatcatgccattgcactccagcctgggtgacaagggaagactctctcttaaaaaaaaaaaaaggtcagtcagtcaaggtggctcatgcctgtaattccagcactttggtaggccgaggcaggcagatcacctgaggtcaggagtttgagaccagcgtggccaacatggtgaaaccccatctctactaaaaatacaaaattagccgggcatggtggcatgtgtctgtaatctcagctgcttgggagactgagacaggagaatcacttgaacccaggagacggaggttgcagtgagctgagatcatgccactgcactccagcctggccgatggtatgagactctgtctcaaaaaaaaaaaatctatatgagatatataatgtatatataataaatgcataatatatataatagcatatatatgatatatctatatgggatatatatgatctaaataaggcaatctatatgataggacatatataactatattaagttgtatcactactgcctctctggagaaccctaactgataacaaggccctccctgatcgcccttcttcccctgcttcgtattccccatcacacgcactgcagtctgtattgatacttgttttctttctttaccatccatctccatcacgggcattcaggtagagatctggatgttgctggttctgctcactgttgttttccccagcacttggcacggcacaggcacaggcagatagtaggtgctcagtaaatgtccgttgaatgaaagagttaatggtaggtgctcaataaatgcttcccggctgaatcacgaataagcaagtgagttttctgaggcagcagcccattccaccctggacctaacatagtccctggagacctggatctgacttggattcctcagccttttgtccactgcccctgtctgatttaaaatgtaggttttattcttattctgagaaggtgaggcccataggtcaggagacaccagggattgaaaagagagttgctacagttcctgagaggcgagggcagtgccaggccacacagggaagcccagggcaggtcaggaggtggaggggctgggggaagacgggggcaggagcttctctgtcgcttccacagcaaggagcaggattggcttctctgagtaatttagcggttctggggcacaggggctgcccttgttgtctggttctcagccctggatgagggcaggtgcacagagcccctgagtgtgggagcccagttggggaggtgctgggtgtgggctctggattgggtggtttgcttgtgaaaggcacgctctcaaggggattctttgccgtctctaggaatcacctggatctgggagtgacagtccctccaaggtcggcaaggcttcaaaatgtcaaagcatcagaaaataaaaggcattgttcatacaatctttgctctagccagagataatcccctgcatttggccttagcatgggcagccggagaaggctctgggcccagatcttggctgaggggcagcctcaggagacccaggctgcagagggaaggcccttctgctcctccctgcctggacaccatcttattgtaggaatcccagtcagtacccgggaacccagtgcgcctgccccagagcatgatgaaggggcctcctgggtggactgatgcccctggcagccgcagattcctgggctgagaatggtccaactgagaggctgggcctcagctcacagcctcagatatgggggagaggaggaaggtcttcctgcagaatcccagtgtggtggcagtttccaaattacatgagatgagctagggatcctctccaagatcacagacttttctatgacccctgacaggccaggcgtagggccatgaacatgagtgatttgagtcaagcaggtgcactatccaacacacaccttacagccctaataatattttattatacatactattatttattaatagaaagtttatatttgtaatagagtcttaaatatttatataaaagagctacatacattaacagggcttacatcattaatatagggtaatactattctcactttcaattgaggaaacaggctcagaacactaataattagttcgagatgatggagctgaaaagccagactttatatgcaatgtttctgatttctaaatggcaaaaatttacatatttgttaagaaacgctattttgggtcaggcgtggtgatgtgtgcctgtcctcccagccactctggaggccaaggtgggaggattacttgaggccagaagttggaggctgcagtgagccatgattgtaccactgcactccagtcggggcaggagagtgaaaggctgtctcaaaacaaacaaaaaatatatgctctttgggcctggactggacaggccacacaaaatacccctggggaagaaggagatttgactcctggcttgcagcctgtgtagggccaccaagtgatcaggtggggtctggggtcagggaatcctgggcccagctgctagttccatcacttacaagctggtgcttgctgagctcacttggtacctggggatggtcctagcatcttatgcacaggggttaggctccaggtgaggttgcagatcttgtgctggttggcatggactggatgcatcaacaagccccagagaccaggagatatcccacactggaaagtattcctcatgcatcaagtctgattctgctgctctccctcagcaggaggatctactccatggggtgactcagggatccaagctccctccaccgtaatttctcaagtagacatctaggcagcagacaggggagggcaaagccatttctggacacatagctctcctctccttccactggtgagcagtgttccttgcaccctcctgcacacaaagggtcatgggaagtgcagtctctggtagggggtcagccaatccccaggaccaactccacaccctggaagaaaggtgcaatggtctgaatttgtgtgtctccccaaaatttacatgttgaaaccctaacccctaaggtgatggtattaagagatagggcctttgggaggtgatgaggtcatgagggtggggcctcatccataggattagtgcccttatgaaagggaccccagagagctccctcactccttcctccatgtgtgggcacagcaagagggctccctctatgaactgggaatgggccttcaccacacactgactctgctggcaccttgacctcagccttaccaggctccagaactgtgagcaatgaatgtctgttgtgtataagccacccagtctgtgatattgttacagcagcccaaaaagaaaacaagagtttgagcggaggctgacccccctgctacccaaagcccagggtggtaccagcacatgtagacatcaggtacaggtataaaaggttaaattcccagtgtttgggggggcatttctgagccatgacagtaacagaataaattgccacccctgcctggtcccagcgatgctcaccccttgctgggatgattgcagaggtctccccgcctcactcttgctccatcctccctgccccgagcctgtttgccacgcagaagcccttcacgtccctcctctgaccataaccctccatggccaaattatattcaaagacatacagactgtgttggaataaattatattgaaagacatacagactgtgcctatttgaaccagatgaagttctaagggctggagaaacagctatgaacaagacttacaaaacccctgcccttgtggggttgatgttcttctgggaagtgacaattttttttaaagccgtggagaaaaaaatctcagaaagaggagggtactatgcagagggtcggggcaggttccagatttaagaaggtggagtggggagacccgctgaggaggagacaggaaagcagaaactcagaggcaggacaaggcgggtgaggatgtgggggaaagtgtttcaggaagaaggaacagccagggcagaggcctggggttttgcccacgcctgaggcagagtgacaagaggacagagaacagatgggggctggatcaggaggggcgctggccggcggggtgaagactgcagcttgatgggtgaggtaggagtcatggagggttatgggcagaggagggacatgatgggcttctgtgtggagaacaggctgggggcagggagaatggagcaggggtgaagcggggagacccctgcaattgtcccagtgaggggtgagcatggctgggaccaggcaggggtggcgagaacgtgatggattctgggtaggttttgaaggtaaatccgtgatacaatggactttggggactcggggggaagcgtgggatggggaggcgaggtttagataaaagacaacatacatggtgcagtgtgatgggtgcaccagaatctcacaaatcaccactaaagaacttattcgtgtaaccaaattccacctgtaccccaataacttatggaaaaataaaataataataataaaaagaaagttaagccaacaggatttatgatccaacacagcatccgactccactgtataaatcttgggtctccaataggaaagcacagctccgaaggggtctgggctggtgagcgttgcaggctgaattgtgccccccaccaaattgatgtcctaaccccagtacttcccaatacagtgactgtattgggagatggggcctttaaccaggtggtcaaggtcaaatgaggtcacaagagccagccctaatccaatctgctggtgtaattacaaggagattaggactcagacatgtacagagggtcgaccatccacaagccaaggagggaggcctccgggaaaccaaccctgccaacaaatgatggtgtgtcccttcggggctaaaccccaagaggcctctgtgctctctcttactctcaggtccctgctcagccatgtgcactggcttgagctagcttgctggaggttgacaggcccatgggggaagtcatcctggtcaaaggtattctaggccagccagcacaacccccagcccacagtccaagctgtggacagatacaggagcaagtccagccaagatcagccaaattcagatcagcagaactgtctagctggttcataacttcatgaactataataaataatggttgtttctgttttaagcttctaaatgttgccatggttggttatacagcaataactaactgatagaccttcccagagcaatgtctttattggtactcccaccaccaatgtataagaacacttatctcagttactccctgacccatcctgaggaataactgcaaacttctgattttttagatcttcaagggtccagggtgggtgtgtagagactgcttattgttccccaacatctggtctctccttcttccatagtactagaacccttacattttagctgcatttcccagtctcccttgctgctaggtgtggccatgtgactaggttccaaccaatgaggtataagtagcaacatcatattgccacttccaggagatggactactgcattcagattctggttttgccacttctctgttgaggaactttggaaaggtgacttagtttctctggtgcatcagtttcctcatctgtagagtggggataacgatagtatctgccttatagtgttgtcaagaagtgaagtaacacaatgatgcatttagaacatgcttatggctgaatgtggtggctaacagccagatgtggtggctaacgcttgcaatccgagcgctttgggaggccaaggtgggcagatcacttgaggtcaggagcttgagaccagcctgggcaacatggtgaaaccctgtttctactaaaaatacaaaaattagctgggtgtgctggtgcacacctgtagtccctgctgctcaggaggctgaggcatgagaatcacttgaacccagaagataaaggttgcagtgagccgatattgtgccactgcaatccagcctaagcagcagagtgagactctgtctcaaaaaaaaaaaaaaaaaaaaaaaagaacagtacttacacatgggaagttttgttatgtgttgttatcattatcagtataataatactttcattttattttttgagaatgggtcttgctgtatcccaaggctggagtgcaatggcgtgatcatggctcactgcagcctcaaccttctgggctcaagtgatcctcccacctcagcctcctcagtaggtgagactacaggtgtgtgccaccacatctggctatttttttttagagttttttgtagagatgggatctctctatgtttctgaggctggtctcaaactcctgggctcaagcaatcctcccacctcagcctcccaaagcattggggtaacaggtgttagccaccacacccagccaataatacttttattatcagctcctaaggttgatgtaaggtttaaatatgaccaagctccatgtctattatcagaacaagttttcctgatgcttatttgtctaccaagaccaggaagaaatattaggaattatatccatccatctactccctcctccccagcaccaccccatgaggctcagtagattttccatttccttcgtgatacgtactcatttgcccaataaatctttttcaaagcatgaaaattcatagggggatctttttggcccaaatttcttgtaagagatgcctacagggaggtaaatgttcatttatagcttatcacctgttttacagagaggttgagaggtggaaagaaatggagggaaggaagaggtaggagtgaagttggcatttttcattgttgatccaatgtagcacacagacgttggtgtgagcagatgcatgtggaaaggaggaggagaaatttgggtcaggaaggaacctgagctatttttttctctcagtggtgggtgagtagctgttttaaggaaaaagaaagtggaaaaaaggaaataagagagtgaatgcctaatatataaatactcagaacttctgcaccctctgataagtaggaaccccaagaaacaagaagctttgggggtgaacggggtgtcgttcattcaataaacatctgagcacctattctgtgccaggcactgttgcagggtctgggaaccgagcaatgaacaaaccaaagtcttttaccatatggaaccaccactcctaatttctgggcatgatcagagaatgggatgaaatggagagtgaaggggaggccgcctcaacttcagtggtcagagagggccactctaagaaggtaacatttgagcagagacccacttggcaaagagaagacagttacataggtatctaaggaaggcattctcctttcatcaaagtgttcactgatgctttgcttagaagaattgacaacacccaagagtccatccttagaagactggctgaatgtatcaggattcaactgggtgagaaatgagttgaatatttgaatatggtaggagttctgaattacagaattaaatgaaaacaaacagaacaatcgatgacagcatatatgtgtactctcatttgtgttttctttaagtgagggggcttcaggggctttcactcagcagctatttacctactttcacagaaacatttcaataagttagcaacctatatagaagtagtagtgctctgctaattatcagttgtgtatataaagcgtatcagtcagttttgctgtgtaacaaaccactccaaaacttagtgacttaaaataacaagcattattagctcatgaatgtggccacaggggctaagttaaactggatagttctggcctcagctgacttcatgtgttcaactgtggtcagctgtgggctgcctggtccagaataaccttgtccgagatgactcgcctctcctccttgggcatctcatcctccagcaagccagctcaagccagtgcacatgactgagcagggatttgagaggaaaagagagcatagaattcttttgaggtgtgtgtgtgtatgcattgatcctcagcctcacttctcccatacatagaatgaaccttgttattattactcattccataataacaatgccagatgcctatcagccgcaaactatgagatatgcactgttgttattggataagttgtgataagtaaatttttttttttttgagacagagttttgctgttgatgcccaggctggagtgcaatggcacaatcttggctcactgcaacctctgtctcccgggttcaagagattctcctgcctcagcctcccaagtagctggaattacaggcacccaccaccatgccagcttttttttgtgtgtgtgtgtttagtagagacggggttttgccatgttggccaggctgctctcgaacttctgaccttggctgatccgcccacctcggcctcccaaagtgttgggattacaggcttgagccaccgtgcccggccagtaaataatattttattgatgctgagttgttagttatttacattttaatatttctcacattgaaatatgtcttacaattgttcatatctttggcttttcttcttttttccttacaaagttcttaacttctttattttataagcaatacatctgaaaggaaaatcatcacattcatggcatatcatagtcaggaagaaaaattaggttgcatcctgaggttgaccaaacataccagattcaccctgttaagtcctggtccccaaataaaacattgagcacttcctgtaagccggactccttagcaaaaaaaaaaaaaaaaaaaaaaaaaaaaaaatatatatatatatatatataaaatgattaccacatccagaaagtttgtgaactctcttcaaatatcagcatggcaaaactcacatatatatatatataaaatatatataatatatattatatattatataaataatatatattatataatatataacataaatatatatataatataatataaatataaatatctatctatctatctatctgagttttgccatgctgagatttgaagagagttcacaaactttctggatgtggtaatcatttaatattattaccgctttttttttttatcatgaaagaacaaatgtaatgttggtaagcctggtaatcttgtgattttttttcttttaaataccttttgtgtttttaacttgagaagactttatagacatatctatgtgcccacagaaaatatcgacattgttttatgtgttgctgggttttcacgtcattcatgtcagactgcatctgtagatttgcaacttgcttcccccatcctcccatgaaatgatgtgtcttggagaccttttcatatccatccacgatgatctattttgttctgtaaaatgagtataataacaacactcaaccaacatgatcttggtgaggacacattaagctctcaataaatgttacttgatttataatgattctgtctttggaatcatttttctagcgagactgcagaaaagccctgtgggctggaagtggctaggagaacctgtttctctaagcagacttgacagctcgctgcccttgtatgatttaccccatacacccccaagtgattgtatccttctaggttttaaataacaaggtgagttttcccatttcaatcatacttcttccccttgcaatcccaccttaaataaatggaaaattttttagtagtagtgaaacaagaaggtctttggggacatatcgctctgggtttaatcctggatatgccatttacaagctgacctgccccagggtgtccgaggctcccaaatgatcacagtttggagatggccacgtacactagatacatccacacaatgtgattaattccctgcagttgccaaaaagcatgaaatagattcctctccttgtgggatggtccctactgataggattccctgcttggtgccacagaaccctgccttatgggccacagcagatgtaccagaggatagaacaacaggtcactggcccatgaagtggtcttatggcaaagtcttactcaacaggggtctgtgatcttggatgtctcgatctggcagatcatagacttcatcctgccaactgacgagcacagttcagttcaggtcacgtcactcattttccttttaatttaatgaattaccatcattaaaacattgagatagtttacatttacaaacaccgtttttcattcattcgactgtttcaaaacaacattcatgggccatctggtatgtgccaagacacgttccaggttctggaggctcagaggtaaattagaaacacacagcccctaccatcatgggtctgtaccattttagaaacaaggcagacagtaagcaaaaagaaatattcataaagtaatgagctccagcttattttgagaaattgaaatatcaaaactcactgggccagcaactccattagaggacataatagaaagatagtgaagagccatatcacagtggttctaggtaaacaaagagctcaaagtcagagcctcaaagctctctggcccttgaaaagttgtgaatatcatcctattaggcatacaggatatgcttcaggcatactgggtgtcacctgcaatgtccagcacgtagtgagtgctttatgaatgtctgtctcttgagtgattgtggaagctgtgccttttctggtgaccagatcattgggaagaacacttattcatccattcaacaattccagagagatttgattttgtgaaggactcactcttgcagagggtgtacaattcaaaacccacataattcaagactaaccctgacaaaaagatggtgggtgtgtctattcaccagctaaagcgacactaaaataacagtcacagtttacaatgtatgtgattggttgtatttggaagcatgagaaactgtagccatgctgcatttctgtaaatctacaataacatccctcttgtgaccccagcttgcaacataaaaaatagcgctttgccggctgggcgccgtggcttacgcctataatcccagcactttgggaggccgaggcgggcgcatcacgaggtcaggagatcgagaacatcctggctaagacggtgaaaacccgtctttactaaaaatacaaaaaagaaaaaaaaaattagccgggcgtggtggcgggtgcctgtagtcccagctactcgggaggctaaggaaggagaatggcgtgaacccgcgaggcggagtttgcagtgagccgagatcgcgccactgcactccagcctgggcgactgagcgagactccatctcaaaaaaaaaaaaaaaaaaaaaaaaaaaaaaaaaaaaacctagggctttgccaataactcgcatatatttatatagccctctcctccccactccactgcttctcccaacccagaataaccaacagcctgaatccggggcatacctttctctgaatttcctttctgtactttccccctcttcagagctttttgggaaacttcatgttaataatttcaatccggttcagccaggccctgctgtcctaagaacaaaagctgtcacttaaaaatgactttgcagttgttgccctcatctgttttcatcccatgatctctacagcccagagatctttgtttccaggaaacagcagggctttccccaggcggatgggttctttgaaggagggggaaaaaaaaaagtcttctccagctattctgtgtagagcgtcagcaccaccgaacgctaatgcttgaatggtttagaactgcggacagctcacgccagacagattcagcaccacggacagcccccaaggcagctcgtgatgtgaatggttcagcaccgcagacagctcaagcctcgccggacagccctgctggaagtggttcagcaccacggatagccccgctaatatccatcagaaccccgggcggctcaggccagaatggttcagcaccacaggcagccccccaggctcgcaggacagttccccccagcctcgcagggtagcctgtgctgggactcttccggtatcacgaagagccctgctggactggttctgcaacatggataggaacaagtgtcatttcgccatcacctgtgctagatgtagacgctcttctgagctgattcctgagccccctctgcaactttcacctctggagactctgatggggctatctgggtaatccaggctcttctggagttgacctcagaaatgcaggcatccaacagttaatatgcccaaaagggaactctggattttccccacaaaataaacttgatctcacttagggcacttcagggcactcagttgctcaggcccaaagcccagaagtctcccttgattcgtctctttctgtcacacctcgcactccacccattagtgagtcctctcagctccacctgtagagcaaatcctgaatctacccactgctctccatccccattgccactgccttactccaggccaccgtcgcttctcacctggtttactgcaagagcctcctaagtgatcctcctactttaccgccccttctagtgcattccccacacagcagtttcagtgagccttggaaaatgtaaaccagagtctatcataccattcctcagtacctgccactatctccaatacacctataataaaattcaaagatcttcctgtggctttcatgactctggatgcctatcttttttttttccttttgagatggagtctcactctgtcgcccaggctgggtacaatggcgtaatctcggctgcaacctccgcctcccgggttcaagcgattccccttcctcaggctcctgaatagctgggactacaggcgcgtgccaccacgcccatctaatttttgtatttttggtagagacggggtttcaccatgtcggtcaggatggtcttgatctcttgacctcgtgatctgcccacctcaacctcccaaagtgctgggattacaggagtgagccaccgcgcccgggcgcctctctatcttacatcccatgacactctcgctttcctggtcacactggccacaccacctccctgttggttcctcagggcctttgcctctggtgtgctctgtccatggtgctgaactcattcaagtgtggattcaactataactgtctcctttccaccatttggtccttagctcaaaatatgaccttttctaaaaggccttccctgaccatccccacctaaagtggcttcaaagttactatcacagtgatttatttcacagaatttagtacttcacagaatttagcacaaactatatttcattttgcatttattggtttacttgacactgtctgttttcatcattagaatgtaagctccattaggccacagacatcagttgccttagctacccggaacagcatcttcacatggcagttgtttaataaatattagttgtatgagtgaatgaatgaatgagtggatgaattctcagccctgcattaatttttcttttcctggctagtcatggagccccaaaaagatgtcaacagcacttacctcctggtaaaattgtggtccagggtttgtgttggggtccccaagatcatccgcaggtttgatgatttcctgggaggaggactcaagagagactcagcacatagtcatactcacggctatgatttactacagtgaaagtatacaaagcacaatcaacaaagggaaaaggcccatggggataacacatctgtactccagcccttggcttgctatgaggctatggcaagacagagaatgtgttatgttacagtaggataatgaagaattggaaccaataattcaatctaccacacgtagtggtggcatatagctataattttttaatcgtgattttatttcccttttaggttatggcacttgaaactggctttccacttataggagtgctgtaaagtttccatttaaaggtacttcttaaatggttttagaaaatgaattcattttaaataaaaatattaagtaaataggaatgcagggatgttatgtgtaaatgaaagcaatcatgaagatgttactcattgctgcagaaacagggcaaacattgaaaaagggtgtttgagaggttgaagtttgagaaacattaaagacataaaacaggattccagacactttcccttcattgttttcttctgtttagggaagaaatcacctctaaggggtcactcagtaacattcctttcggccaggcactgtggctcacgcctgtcatcccaacactttgggtggccgaggcaggtggacgacctgaggtcaggagaccagcctgaccaacatggagaaaccccatctctactaaaaatgcaaaaattagctgcgcatggtggtgcaagcctgtaatcccagctactcgggaggctgaggcaggagaatcgcttcaacccgagagacggaggttgcggtgagccgagattgtgccactgcactccagtgtggacaacaagaacaaaattccgtctcaaagaaaaaaaaatttgttccctcagaattctggggaagcccctcaaacttgagtccattttgaaacaaccataattcatctggactatcaggatcataactggagatttttaccccatattgaggacctgctgttcaataattataatgataataccagtgacatttactgagcactcaaaattaggaggcatatgtattaacctatatgatgttcacactaaccctatgaggtagaaaatattattgtccccattttgcaggtaaggaaactgagaccgagttaattcacttcccaaagttatacagctagtacattgttagatctgcatctggatgcccagttcctaaccctctcaagactctgtgacctggggcagctcacctggtctcctgcactaaatgtcttgttatcaaaggaggtgatgaggattggatgaaatgtctaattcttgacacttcatctctcttctctgcacactctgaactatctttggaatggcaggaaactcatcttctaaacatagaaatgaagaaagtttcccatcccaattacataacctatctgaaaactcgtaggcaaacccaatctcagtccttccataatcttactgtgtgtcctttgtacaactcatttaactcctttgtgcctcagttctcttctctgttaaatggggataataatactaccactttgggctgttggaattaaatgagataatattaacgagatggctttccttgtagtatttttttgataaatgacagttatttttgtttttctgaataaccagggtaattcaattttctatccattagggaaaggaggttaaatccttacctcataccattcaaaaaaattccagaaggttcaaacaaaataaatatataaaataagactgtaaaatataagattatacaggaaaatgtgtttatgagagtaaggggaggccaggagaagtgattcatgcctgtaatcctagcactttggaaggctgagctgggaagatcagttgaggccaggagtttgagaccagcctgggcaacatagtgagaccctgtttctacaaaaaatttaaaaattagccaggtgtggtggcacatgcctgcagtcccagctactcaagaggctgaggcaagagcatcacttgaggccaggagttcaaggctgctgtgagctatgatcacactactgcactccagcctgggtgacagagtaagaccttgtctcaaagagacaaggagggggaggaggggcggggaagagagggagagacaaggctgaggaagggcatcttaagaccctaaaagcaaaaaataaataaataaataaaaaggatatcttgtatttttattaaaattcaaaacttcaggcactgtgtaaacacaataaaaacataagggaggagccaggagaaaatatttgccacagatagagtaacaggcaaaggattaatgtgcagaatatagaaagaatgtctattaatcagtaagtaaaagctacataaacaaatagaacaatgcggagaggaggagataaacgggtaattcacagaagagagaataagcctgttcaaatacatgtgtttaattctcctcactagtaatcagggaaatgtagctaagatgatgcagggacgccgttttccccctacctatggctttgccgaaaattttaaaaatttaatgtagcctccatgagagcaacttggctgtagtcactgcattgtaaatttgaacaacaatggtcattgataataatagcagctattaggcactgttgtaagaactgtacgtgtattacttattattgttattattgttttactttcacagaaatcctgggacttggtaaccataattattcccacttaacagcatgggcaaccgaggcacggaaatgttaagtaacacacccgaggactcactagtaacaaatggcaaagccagccgctgccccaggcggtcgggcctcagggtccccgggctgccaccccctgccccagctccttctcccttccgcccaccccggactcccggtttgcagactggagaaccacggggggcgtacgcaaagccgctggccttggggcgtctgtcgcagggtacctcgaacataacctacgtgctcatcagctagagatggaccagctcggtaccacacccccctgcaaccacgccgcgggtaccccgcctctgcggctcatccactcccttccccacgcgcctccaggtgcaggcttcccgggggtggaggaggggaggaggacacccacgctccccaattcccccacctcccatctcccacctccccccacccccccgcagcctccgcgtctgcgcagccgcagtcagtgcggcgccagctctgcagagcccagacagggtccggttggggagggtgagtccttcgagggacccccgcgggcgggaaggaggcggagaaaaggggctgggggcgcgggcggcgatccggggatgcgcgcgcgagtatggatgcgcagagggtgtgtgtgcctgggcgagggtgaggggcagaaccgctccagggatagggtccggggagagggcgtctccaagcccgtccggtgggagaggaccggggtctgtcggggtcgggtctgtttctccgcagcggaggtctgtgtcctggcttgggggttgcaggtgaattccagcctcctcgtgaggaggggagcacagacctgtgtaccctcgtggggcggcacgggcacgtgcgctcgtctcgctggggcttggtgtcgatgttcgctccccctggggtgttcagcgcacctgcccgagtgtgcacctgtgcgtgttcgcgttgtgtgtccgcctgggcccctgtggaccaccctgcaacggtgggagcgcaggctctcagcaaacaggtgcagcagccccgcccccactcttctgagctgtgtggctttgatcaggggacttccctgtctgttaaatggaaacctaatagtatctgtagcgagaagtatggccacctttatgtgagaaaagggattcgcagggctcagcagggctgggcacaaggagagttctgggctccgggaaacactgccggtatttttattgcttttactgtggttgctggttgtcgttgttgtgactgcgtctccattctctcaggggatgacttgtttgctatttcaccatgaacactgaggctgtggggtgtgaatctcctccccccaccatacctctgtctcatcccctttccttcttcctcctccattcactgcggatccagcttctcctgaccttgacctgatggctgtcgtctttcccatctgtcaccccgcttgcctgcattttctcctttctcatgccttcccctcccctcaacctagatccatgattaattatgtctcatattaaaaacaaagccaagcaaaaccccaaagcaataaacaaatcagaactccctaatggtactctctaacactctttcccacgaaggtcccataggaattttcttgccctgaaaaatgtctaggcagcctcctctcctcactcccaacagactccccggcccacactgaggttgcaaatgggcaaccccagggtctaattcagccccacaacttgtgctatttgactaaaggtgtcttcctgttaaacactggaaataattattgacatcatgaaatgtagaaaatgccatctgaaaatatagatttccagtcttcttttgagaaatcacaggatgggcgacaccagtcccatgcgtttgctctgcagacattagctgagttgcatggtgcagcttcttcagacaggagacctgatctctcttgccccactccccactgcctccgtcgtctctccccatgccatatatccactgccatttgttcatgtgctccttacaatagagaagtatttctctggacctatatttaattttcatttgtagaaaagtgacagtaaaagagtcctcttgattgactcattgattgatttttgagagagtctttctctcttacccaggctggagtgcagtggcacgatcctagctcactgaagccttgaactcccaggttcaaaggatccttccaatatctgagactacaggctcgtgacaccacacctggctaatttttaaactcctgggctcaagcaaccctcccaccttggtctcccaaagtgctaggattacaggtgtgagccacctcgcctggctgatttatttattaattcatgtcgtttcctatcccatttgttatatacaaatgtgcagactggagaatcatgtgtggctgtaggtgtgtatatgagtatgtgagtgtgtatgtgtgtgagtatgaatgtgagtgtgtgtgactgtgagtgtgtatgagtgtgtgtgttagtctatgtgagtgtgtgtgaatgtggatgtgtgtgtgtttgtgtttgtgttagtgtgtgtgtatgtgactgtgtgtctgtgtgtgtgtatgtgtggatgtgtttatgtttgtatgtgtgtatatgggagtatgtgagtgtgtgtgtctgcatgtgcctgcccatgacaatcactccctttccagctttgtctccagagcaccctctagcgtttgacctgctgtgtgctttatttgttccctgcctgtctctttgtctccctactagaatgtaagccccaggagggcaggaatctccacttgattactgctgtatttctaatgcttacagtcgtgcctagcccctgctggccctctgtaatgattcactgaatgatgaaatgtccatcagtcctcaggttctgaatcttgtgcctggagaaccagagaggaccctggagcaggaggagaaagagaagcttgtctcagaagctccacctcctcctggggcaatgcagagtctcaggcctgagcagacacgggggctgctggagcctgagaggaccaagactctgctgcctcgggagagccgggcctgggagaagcctcctcatcccgcctgcaccaaagactgggaggctgtggaggttggggcctccagccatgacagtgatgagaaaggtgagaggcaggggtcctttgggaggtgagtgggtggagaggaaggaattggcagagcctagggaaagactaaacattcactccttcactcatccattcaacagctattcatggagcactgtgtcagtcagcttttgctgtgtaacaagtcatccccaaacttaggggcttaaagcaacaatcacttatcagctcatgattctgtgggtcagaagtttgacctggcttcaggggacacttttcctgcctgtgcttgtctgtgcagcctcagagagctggtgaggccactggtcgatctcagatggctttacccccatgtctgctggtgctggctgttggctggcttggtggtgctgaggacaggccatgtgtctccagcaggatttttcagggttatcctcatgggggtgcttgcagggttctcagggatggcaagagagggaattccccaattttcaagcactggaagatttgaagaggaaaaacacatgatctcatttgcatttcaaaaatattcctctaactcagtggatttcaactgggcgtggtcttataccccacttctcctccccggacgatttttggcagtgtctggaaacatttaggattatcctaactgtggagatgctgctgttatcttgtggggagaagccagtagtgatgctgataaacgtcctaccatgcacaggacggaccctccccccacagaaagaatggtgcagctccaaatgccgatagtgccaagtttgagaaaccctgagtctcactgcatgtgagaatggattgtagggctaggaagtcaagaatggaaggtgggaggccagttaggagattcctgcaactgtccaagacagaggtgaggtaagtggagagatttgggacatctttgggagaaggaatcagttcttgctgatggatgtggagaaggggaggaaacgagaggtatcatgatgacttttagggttttggcccaaacagatggataaaggatggtgccatttgccgacatctcaatgacaccccatagcagaaaggggctgaaccttataccaactactaggcactgtctttttcctcaggggatgagcagggctgggacagaaggagtggataacagaggccagctctgctagtgaggcttggagctcctggctggggctaaggtgcagaaagagtggaaaatgccaggatttgcccagtctattcagcttagggatgagaaggacactaaggttctgactatggggacatgtccccactagtgtctgttctttggaagctggggaagcctccatcatcctggtttacttctgtggctttttcttctgctccttcactcagtttctgctgggggcctgtagagaaggaactcttttatctactggacaggtaagggactgaagactcaagtggcagggcacatcaggtgacccagttgaagttttctaggtagttatagaacagaattcaggtctttcattctctcagccccatctgaatcatcacataggcatatgtgtgtttgtgtgtgtgtggggttgtgtgtttgtgtgtgtgtgagagagagagagagagaaggagggtgagagagagagagagagagagagagagagaggaggctattactagaaaagggacaagatgccagtgggaagagcccactcctgccatctggccactcactcatggctcctttttcctccactcccaccctcacccagacctgtcttctcaagagactgggctttcccaggagtggagctcggtggaggaagatgacgaatcagagggctcccaggtacactggggggtttgttctttttccacaaatgtcccactctgtagatctcagcactttgtcacatttgcattctcagcttggaatttacctgccccataaaaatctcaagagatctcttgtgtctgatctctatggtgatcagacacagactggagggtctccatgtggtgtgtgtaactcagttcacatgtaccctccaacacttccttcataaatccatctacccatgcatccacctctgtacttcatcttctgtccacttattcatcaaccctcccttccatccaccctcttacctttccaatcactcatccattcattcatccacctctcaaacatctactagccattcactcatctgtccactctttcatccacctaaacttttattcacctacttgcttgtatacccattccatccatccatccatccatccatccatccatccatccatccatccatccatccctatacttcatctgtttatccacttatccatccatccatccatccatccatccatccatccatccatccatccatgcatcaacccatccctatacctcagctgtctatccacttttccatccacccataaaccctcccttccacccaccctctcacctttccattcacctgtccattcattcatctacccattgaacatccaccaactattcatctgtccactcattcatttacccaacctttcatcccttatgcatccatatacccattccatccatccatccatccatccatccatccatccacccattcatccatccatatatccagttatccatatacatactcattcacccttttattcagatgccatcaatccatctgttcaatccacccacctacatatccatcccctatccactcaactgtccacccacctattcatccctctactacctgttggctgtggtgaggatatggctagtatgcatccacccatatgcccacacattcattcatccatctgtatctattcacacacccagtcataagaccacctaccaatccattcacccatccacccactattccatttatccatccactaatcatctactgagttttaatccagatactacaagtaaaaccaaagacaattatcaaacacatttctttcactcaaaaacctaatgttttcttttttgaggaataagatatcaatataagaaaaccagtggttctttcatttatacattcatctcatacatgagaaaaatcacataatcactctcagtgagcacatgagagtcccatccatctcccaatcatgtcaggaatgtaactctggctgcctcaagccagaaaatggatttattggctcgtggtgcagggatgagggcgagggaaacaaactggccaacaaaccatgatagtgcagaaataagtgctgggcacagtggagtggcccaaaggaagaagttaactgcatgccaggaggtttattcttggatatcccagagaggaggacacaccacacctggagttttcgggatagtaagaattccacaggcatagcagggaagggaacaacatgtgcacaggcaagttggtataacaaggtacgtttcagggacactgaagttaagggcagagcagtgggaggtttgggtgaaaatatggctgggatgacatcattcactcattgcacgtctatttcttgagcacctgctcagtgccaagcagtgttcaatgcacagagtgtacaatagtgagacagaagtggtccctgccttcatggagctcacagtcaccgaggtagacagacgacaattgaaataagcagctaaaatatgaattgggttgagtggtgataactgctatggagaaaaatgaagcaggaagggggtttgggagtaggagctggggctgggggttgctattttaagaagcttgtctaggaaagtccccactgagagggagctattgagtgaggacctgaaggaggtggggagtgagactggcagatgtctagggagagcgggctctatgcagaggacacagcaagtgcaaaggccctgaggtacagatgtgcctggtacatttggggaacaccaaggggcatggtggtcagtgtggctggagggtgggagggaggactaggaggtgaggtcatgggggcgatggggtggatgatgtagtgtctcatgggccatggtgaaatgtgagttttactctgagtgggtgggagccataggcgagttctggacagaggagggacatgttctgatttggcctttagcaggactcctctcactgctaagtcccacaccgaggaggttggatgtgttttgcaggcagtgggagccatcgaaggtgttcggggacttacagaatcactctgggagcccatgtggaaggaaggtgggttggatgtggctggggttagagtttagaggggcaaaggagcaagtcagaaatgtatagttagggaaaaaaggtagaaatgaaacagagaagagttgccactttccttgtgcatgttacaagcttcatgctattctttttattttttatttttttgagacggaatctcgctctgtcaccaggctggagtgcagtggcactatcttggcttactgctcactgcaacctccgcctcctctgttcaagtgattctcctgcctcagcctcctgagtagctaggactacaggcgcacaccaccatgcccagctaattcttgtatttttagtagaaatggggtttcaccatgttggccaagatggtcttgatctcttgacctcgtaatccgcccacctcggcctccgaaagtgctgggattacaggcatgagccacgacgcccagccagcttgatgctattctaagctcatcttattataacacatctagtaactgaacactcattaactctcataactcatgagccttgtgagattgttagcatggtttcctcctctacagatgaggaaactgaggcagagaggaaccaaatggcttgcttcaggtcccacaatgagtgggtagcagagctagcatagagtttgggcttggaggggaggataggagcgaatgggacccaggacctgatgacatttccagacctgtggaacgtaaaaggtgaaggaacagggacaagcccaggggcaacacgtgaattctgatgtggggacagggtagagggaggttctagcctccagcatagggatcaaggaggcagtttggaagaaatgacaaggtcgattttagacatgctgcttgggagaggcctctgtgacatcattcattcactcactcgtttgcccagttgtaattccttgagccagcattgatggagcacacaccagggggctgataggggagggcctctcattggcaggccctgggtcagttttctgcatggacagaccctccttcctgcagacaaccaccctctttcaaaaaagaaagaggagcgggctgtctggaaccagagacctttgatgacagttacagcctcattatgggccaggagctggactttgtgctctacttaccttaatttacttggtactcttatcagtccttgatgtaggacctgttatcccattttacagatgggaaaactaaggcacagagaggttatgtgactttcccttgtcatgcaacgtgtaaatggcagagctaggatttgtacccagcatgtctcttaaccactaggtgtcctgcctgtgcttggggcagagatgaaggcctctctctccctgttctcctagtcactatacctcctgtggagaggagtgagtgaagaagtggaagaaagaaaaagagttactttccgggagggcagaagttcccagtctgtgggcacagaagaaagcaagcaggggaaaatggtcccatcattaccgttccataaaatgcaagcatatgtaacacctgcaaatcttatctaagtgcatgagattttaaaaagatcaatgcccagaaataacccctggtaaaagttgctgtaacaggccaaattcatccatagtgtgagaagttggggtagtggttacctttgaggtggggggatttcggggttgataatgatctgcttcctgtttggggtgctagttacatggtgtgttcaccttctgaaggtgcctcaggctgtacacctaggatgtgtgcaacctcccctttctacattccacttcaacagaatgttttaagctggctgggcacagtggctcacgtctataatcgcagcactttgggaggcagagtcaggcggatcgcttaaggtcatgagttcgagatcagtctgcataacatggcaaaaccccatttctactaaaaatacaaaaattagctgggcatggtggcacatgcctgtaatcccagctactcaggagactgaggcaggagaatcgcttgaacctgggaggcagaggttacaatgagctgagattgtgccactgcactccagcctgggagacagagtgagactctgccaaaaaaaaaaaaaaaaaaaaaaaaaaagttgctgtatatatccttgtatatatcctgccaaacatgtttccctatatactgagactgaattgagatttgtgtgccagtgcttgattgagggttgtgctctcaggtgaagcccagcggggagtgagggaagctggagaggggaggagagggagccaggcaaatatactggtagaactgaaatccagtctccgtcttatcgcaagggaaccctggaatgtgaatagagagttgtcctcctctgggctgggcgcagtggctcacgcccgtaatcctagcactttgggaggccgaggtgggtggattacggggtcaggagttcaagaccagcctggccaagacggtgaaaccccgtctgtactaaaaatacgaaaattagctgggcatgggggcggatgcctgtaatcccagctactcgggaggctgaggcagagaattgcttgaacccaggaggcacaggttgcagtgagctgagattgcaccactgccctccagcctgggcgatacagcgagactctccttctcaaaaaaaagaaaaaaaaaagagagagagagagagagttatcctcctctgagtcagtggagtggccttttgtatcccatatgagttattgttggctgtggactgccctggagggcgaattaacctcctgggtaatcctctaggaaggaggatctcattagcaaagggcatttgtcagaagagaaggagcaactacaaactgtaaaccatacaagtagcggccaatacccctagcctccaggggagagctgcaccagcctgaaaaacagaaataaagagaaattaggtgaggcatccatgggtctattatgtgtgatgtgtgtaaaactattggatttcagattacctgtatttattacattttcttaactttatattctgcttttcaaaattgaagtataattatttccaataaaatgcactaaccagagagtgtttacacatgtacatccgtgtaaccaacaccccaatcaagatattgagtgctgtcataattctagaacattctcttattttcccttctggtccatctcactccccagccctggaagcaactacagttcttgatttccacttgcatggattagttttgcttgttgttgaattttatctaaatactgtcatgtagtaaactacatatatattttttaattccaaaaaaggaaattatggcaaaattgttattcctccagttggcattttcacttaatacgtgctggacagttttccatttaatatatattgattatcttcattgtatttcaaagttactttttcctgctgccaaatattctctagctcagttgtgtcagacccatttccttgggtgatgaattgctaggctcccattgctgtcactgttacagaagacaatgctacaatgagcgtttgttcagttggcccaattttacgcatggattatgaggaactttataaaaattcacattctctggttctcctcagatacactgaaccagaaaatccaaaggggatcccaagatattcaaaaacctctcccaacaacttttggtgctctaccaggtttgggaactgcttaagtgggtcattgtccctaggtatctggttgtaaaggaagatttgaaataaggtgtcatccagagggaatcagcaggctaaagggaggaatttgtttcaaagattataaatgtgaattccatcaatgatttataatatactttaataattcgtagtctgtgtccttccatttttcttttttcacaggatttttttcagtgttcaccattgcctaactttccagataatccattatgtcttgtacattcaccaaacttccttgatattttaatagcaattgcactaaattcatcattaatttggaaaattgtcatcgttaaacattttgtcttctcatctcttatcatggtatgttttttcatttatgaactcattcaacaaatatttacagagttcataccctgttccaggcactgggaatacagtagcaaacaaagcaaaggtttgccctcttggtgcttacagtgtcattggaggaagagacaataaacatacatagcatgtcaggtggtgataggagcatggagaaaaagacaaggggcatgcatagtgcagggttaagggtatctggaggaagggcattccaggaagaagaactcgtaactacaaaggcttggaagtgactgtggctggaacagagtgagaaaggcaaggaatgacgtcagcgttagaaggagcactctgactggcccatgggcaagaaattgggtgggattatcaagacaagaaacaaaattctgtatcaagagtacaagatagatgacagtggctttggccagggtggtggtagtgaagggaagggaaatggtcagattctgaatgttttgaagataaagccaacagtacttgctgatgtcttgaatgtgggtggtgtcagaaagagagtcaaggatacaacaattggaggtctggaggggcctgaaggggtaatgggaggaaaactgcatgaggagcttttttttgtgggggacattacaatatttgtttggggacatgtgaagtttaagatgtccatcagatatccaactggagatggcaaataggcagtgagatatatagttgggtcaacaaatacacatacatatgcaagcacacacatatctcttgagggggtggggtcattagagcatagatggtatgttaaaactgagatttaatataccagtgagattttgaaattgtcatcccattattcgaacatttcctctgagagagcatagttatgttacattcttttgtttatcttatatctactcagttgtaccgttttaaattcaaacagcttttctcttgatatgacatttcatttctgatcatataagtctattttcctgcaagtaacaatggtggccccttcctttccaatatttatccttttccttttttctgtttcagggctttgtggagtggtcaaaagctccacaacaaacaaccatagtcttggtagtgtgcgtgctttttttgttcctggttttaacggggatgcctatgatgtttcacatttaactataatggtggctgttgttttaaaagtttaatttaatgaaatagatgccctatgtcatgttaaggaattgtgctagttaaaaatcaggaataggtgttgaatattttcaaatgcctttcaaacatcctttgagatgatttttaaaaaatttttggtgtgagttttcacatactttatttccatgaaatgaagacatcattgattgtaaaacattattttgtataccacggagaaagaaaagtgctaattaatcattaagatgccaccaactggaagatatctcctgactttgagaagatgaaaaaatgtgcaactgaagatcaatgaaatctggtacatttcctaacatcaaaccaactttgcattcttaaggttttggtgcaccagtcttttcatacactagattatatttattgatattttatgtaggattcttgcctctatcttcacatgtgagattggtgctatctttgtgaagttttggtatcatggttaagcttgcatcatagaaagacttgggtaacttttaccttttctatgcttttcaatagtttctgtagcttaggaagtatcagtcccttgacaccttacatgaattcattgttataaccaggtcatagagtcatggagagaacgtttcagctaattcttgggcagctttcttagttctttacaatgttatcagtttattaatactttttacctcttgcatttattttggcgaattacagaggtttttgtttttttttttttttgagaccgagtctcactctgtcacccagtctggagtgcagtggcgccatctcggctcactgtaagcagagggttcatgccattctcctgcctcagcctcccaagtagctgggactacaggcgcccaccaccatgcccagctaattttttgtatttttagtagagacggggtttcaccgtgttagccaggatggtctcgatctcctgacctcgtgatccgcccgccttggcctcccaaagtgctgggattacagatgtgagccaccgtgcccagcccagagttcttttatcctctagaaaattcttcattccatagagctttttcatattattagcttaattatgcataatgttttataattaaaaatttctctttattttgttctatcccctgtttcctgtaaactgctgtttgtggtttactcgttattagatttgtcaaaggtttatctagcttactattgtttttccaaagaaccaacattaggattcatttatatccattatttcttttatttgtaatttgtttttctttgatatgtattgcatttattttttattgtttttcttctttgtctcagtttttatactgaatacttgatttatattctctttatattttctataatagcatacttattaacgcaaatgtacttctggatatagcgttggccacatcttaacatttgattattcatttttgtttatgttgtctaaaaattacattgtagtgtgtctaaatattacattgtagtgtttctaaagagtgctttgaaactcagtgatttggtttattttttgtttaaaaatagttttgttttcttgttttactgcactgtgaacacagaatgtggcctataacacatctgcttccaaaactttttaaaaagcttttagtgtggcctagaacatgtccattttttgtaattgtttcacgaacatttaagatgaagatatcttctctgtctgtagaactgaaaactttatgtgcctgttagttaactcagtatcgtcaattatattgttcagattcatgtgttatctaattttggcctattatattcattaaaaaccaataaggttatgtgaaactttgttagtacaattgtttttgctaataaatttttataatctttgctttatgtactcaacagctgtgtaattcgaggcatataagtgcagcattgttatgtccttgttaattaaataatatatgtaaaacaccatatgacaatggctggcagatagtaggcactcaataaatgttaattaaaacctgattctgaatcctttgttaaatataaaatgattgttttcagtcaatttaatcctttgccttaaattttaccttgtctaatactggttgatattatcatcctgcgctcttctgtctatgtatatgaggttctttagagaaattaacagggaaaagtatggattatctctccattcctctctcaggctgattgcctgcaacaagcaaccagcccttaagagaaaggaaaacaggccttaactattacattttttgagattctactggaaataagagaagctcaattcaaatgagcttaagcaaaataataataataattattattattattcgttcatgttacaccaaagtttaggataaaattggctttatttacagctggttctgggggacctaaaaatatcactggggcttttcctctcctcacctccctctcttccttctacatggctggagacagctatcatggaccctgtgatcatctcttccacacggcaaggtgggagacctggcagattcccatcacgcacacctgcaactcgcatccttgttctgccttggggacaagagtcctgaaattaggggagagagagcagcaactgcaaaggccctgagacataaaccgactgcccaagtaaaggatggagaatggactgcagcaggtcaaaggcggaagcagggagataagtgtggagactgtcttaggtgtccagtcaacaggggatgggccgggcatggtagctcatgcctgtaatcccaggagggaggccaaggcaggaagatcacttgaggttaggagtttgagaccagcctgggcaacacagtcagaccctgtctctacaaaaaataatagtaataaaaattgtcaggcatggtggcatgcacctgtagtcccagctactcagggaaactgaggcaagaggactgcttgagcccaggaggctgagactgcagacagccatgatcaggccactgcactccagcctgggtgaaagagtgagaccttgtctcaaaaaaaaaaaaaagcacccaaaaatgaaaaataggggatgatgttggggggctaactgggctctgattagctcagacagtgccacaggtcttgactgattttgtggaatattgaaaataatcatggccgggcatggtggctcacacctataatcccaacactttgggaagccaaggtgggcagctcacttgaggtcaggagtgcgagaccagcctggccagcatagtgaaaccctgtctctactaaaatacaaagaaattagctaggtgtggtgggcacctgtaatcccagctacttaggaggctgatgcagaagaatcacctgaacccgggaggtcgggaggtggaggttgcagtgagcagcagagattgtgccataccactgcactccagcctggtcaacagagcaagactgtctcaaaaaaaaaaaaaaaaaaaaaaagaagaaagaaagaaagaaagaaaaaagaaaaaagaaaagaaaagaaaaaagaatcatgatactatcagtaatataaatcacattagcaatggtcttctaattagctctacagtatgccagggacctaatttcattgacgacagaagtatccactcaagccactgacgttccattctctacccgacagctggatagatcccattaaaacataatcaaccagattgggcaacatagtgagaccctgtctctacaaaaataaaaataaaaatattagccaggcatggttgtgtgcccctgtagtcccagctactgtggaggctgaggcaaaagggtcgcttgggcccagaagttcgaggttactgtgagctacaactgtgtcactgcactccagtctgcacaacagagagagaccttgtttctaaaacaacaacaacaataataataataataataataacaataacacaattaggaccattcataatcctcccatttcaggtaaagccaaagtcttcacaatgccatccagccctattccaagtggcttctcttccctcctccttatcttgctccctcccacgcagccacactggcctccttgctgtttctcaaactcgcctatcatgcttacttcaggacttttgcactgttcctgctccgcggaatgctctttccccagaagctcccatggctccctcatctccttcaggtctcaaatgtcacttcctcacagaagccttccccgaccaccctcaagtagcacctctctccgcaggtcccgctctactcgtcttcacagattgtatcatgacctgacaagtaatgggtcaatgcagttccagtctagcgtcctcaatggccattcctgccccttgggtggttctccctggaggaactgtgaagatggaatggggggaggagagggctgtggagttcaggttgtgcctccccggaactcctcacacatccataccagcttgtggcacctccacacgaccccacccccatgctcttgaagctgctccgtctcttcctggctttttttttttttttttttttttgagacagcatctcgctctgtcgcccaggctggagtacagtggcgcgatctcggctcactgcaagctccgcctcctgggttctcgccattctcctgcctcagcctcctgagtagctgggactataggcacccgccaccacgcccggctaattttttgtatttttagtagacacggggtttcaccgtgttagccaggatgatctcgatctcctgaccttgtgatctgcccacctcggcctcccaaagtgctgggattataggcgtgagccaccgcgcctggccactctgtctcttcctttaacagggcaggttggaccagggtggtatttgaatatagtatctagggaacactgtgtagggggaaataagtactagaagttggtaaatacggcaaatctaaaatcacagggattaggccgggcgcagtggctcacgtctgtaatcccagaactttgggaggccgagacaggtggatcacctgaggtcaggtgttcgagaccagcctggccaacatggggaaaccccgtctctactaaaaatacaaaattagccgggcgtggtggcgtgtgcctgtaatgccagctactcgggaggctgaggcaggagaatcacttgaatccgggaggcagtgagctgagatcaagccagtgcactccagcctgggcaaaaagagtgaaacttcatctcaaataaataaataaaatgaagtaaaatcacagggattaagtggaccaccccttgggccagtcatgtggcctgtggttagtaattctcatagtgaaatagcccgattacccgcgagatggtttgggagggattaatgagaaggctgcacgctgccaccagagggcagcttcggcatccagtgctgtgagggttcacagaatcctaggtccatttcctctttaccttatctgtcaatccttacatttcagaagctcagaaatattttggataatttttcctccacggactcagaggactctaacctcccgggtgcttttctctttctacagcaggaggggttcatggcaaattctcatcacccctccctattgctgctctgccactgaacaggcgctcacggcagaccaatctgcccacacccaagacactttccagcggcgccgcccatgggcgtccctgctccgcgggaagctctcaccggcggatgcagcccgacgcctgcgcactggagaggcgccaagccccctgcacctgcgcactccgactgggcggggtctcctcgacgtcctggtggaagggttcggaggacggacgccgatcatgcccactaccacgcccccagccctgccagttccccacagagcgggtttgacccagctctttctgctgctctcttgggtgataaactgtgccccatgtctgtaaactagggtagcatttcacgcattcatcctttcacccggcactgtctgagcccgtactgtgtgtcgaggcctggactgggcgaagttcggctctctgtggtccctgattctgaatggctctagggctggtgtgggatgttcaacttactcattcggtcactcagcttttcttgaggacctactgtgtgctgagaccagggctgagcaaagtttgggtcacaggaagaaaccagaatgattggtccctgaacctgtgggctccagggctggtgctgaggatgttcacctgttcatccatttacttggcctctcctgaggacctactgtgtgcttggcctgggctgggggatgtcgggggtgagggggttaaggagaaactaaatgtgtggtccttgtccctgaatgactccggggctggtgctggggatgtataactcttcatactgtcactgacaattcttgaggacctactgtgtgctgaggcctgggtggtcagtcaggagccaagggaagaaccaactgcttggtccctggccctaaagagcctgggcaacagagcgagactccgtctcaaaaaaaaaaaaagaagaaaattctgcatatcatatgctaccatttgtgaagaaaggtgtactatatatctttccagaatattctatgcatataaatattcatatatatgcttacatatagtaagcatttgcttctagtgagggggacttggtagctgggagacacaggagtaagaacagtttttttttttaactttataaattgtggactacatgagtgtattcccccataaaataattttccaatgattatagtcatgtgaagttatgagattataactttaattcaacattgtagtaggtggattacgttcataactcctacttttcacccttccctgggaccacatgcttaggaaggctcttcctgtgctgatcctaggcttggctaggaggcttgctttggcctgtgggactagatgcaaatgtgacaatatcagagacttgaaagcatgcctgtgtgtccactccctctcagactcctgccacctccctgagaacacacccaggtgagatgtgagtcaggagaagaagatcaaattggcccagctgagccctcctggtccaggtccagaccaagcctggtccagaccaacagaaccagcagctgacctccagatgcatgagaaatagtaaatggataaatgagggctggatggtttgttacacagcaagagctgactgatacaagcattaaagtcaggtctttgagttagggggaaaaatggtggagatgggtaggtgtttcctcatactgaaaaaaagactaggcccactctaaaaatcttttgtagaggagaagcactcccttcttctagaataactttcagctctagatttctcctgctcattttctctaagcactatttctatcttagtgaatccagatttcttcttcagactctgctcctttagtaaatatgccaacttggccaaagaaaccaaaccttttattcactttaattcaattaaatttactgagcaagggcttactcaataaaatcaacaatgaaaaggccagctggccaggcaccgtagctcaggcctgtagtcccagcactttgggatgccaaggcaggcagatcgcctgatgttaggagttcgagacagcctggccaacatggtgaaaccctgcctctactaaaaatacaaaaattaggctgggcgcggtggctcatgcctgtaatcccagcactttgggaggccgaggcgggtggataacgaagtcaggagatcgagaccatcctagccaacatggtgaaaccccgcctctactaaaatacaaaaaaactagtccgggtgtggtggccgggcgcctgtagtcccagctactcgggaggctgaggtaggggaatcacttgaacccgggaggcggaggttgcagtgagccgagattgcatcactgcactccagcctgggcgacagagcaagactccgtctcagaaaaaaaaaaaaaaaaaaattagccagactcctgtaattttaactactcgggaggttgaggcaggagaatcacttgtacccgggaggcagaagtttcagtgagccgagatcgctccactgcactctagcctgggtgacagagagagacactgtctcaaagaaaaaaagaaagaaattaaaggccagccataggtgtttctgcaggtctacttgcccgtgccccatttataattttgcaccaggaagaccgcaggggagtctggcagatgtgaggtacagtcttagccctgtgtcttccccactgtgtgccctcaggcaagttaacaagcttctctgagcctcggtttcctcacaggaagcgtcggggataacacagtatctcccccatagcattgtgaggttggaaaggaggccctcagctcttaatcttctgctggtccacgcgggtttctgccagggcacccctgttgacaggtttctcctccctgtgagagcccaggtgttgagtcaggcgtgggagctgggcaaaggcgtcccgaactgtctgcatgcgtcctctggtgtcggatgagcgcggaggagaagctgaaggccttcccgcagccgctgcactcgtagggcttctccccggtgtgcacgatgtggtgctggatcaggtaggagcggttgctgaaggccttgccgcactcggggcaggtgtagggccgctcgcccgtgtgcgtgcgctggtgcagggcgagcgaggagccctggctgaaagctttgccgcactcgccgcacttgtagggccgctctccggtgtggatcttctggtgctctataagcgaggacacgtggctgaaggcggccccgcattgcaggcacctgtagggccgctcaccggtgtgcacgaggcggtgctggaggaggtgggagcggttgctgaagcgcttgccgcagtcgtggcaggggtaaggccgctctccggtgtgcgtgcgctggtgctgcgtcaggtgcgacacctgggtgaaggccttggcgcactggccgcacgcgtagggcttctcgcctgtgtggatgcgccggtgctcggccagagaggcgctctggctgaagagcgcgccgcagtcctggcacgtgtagggcttctcgcccgtgtgcacgcgccggtgctgggtcaggtgcgcgatctgcgcgaaggccttggcgcactggccgcagcggtagggcttctcctccgtgtggatgcgctggtggcggatgagcgctgaggagaagcggaaggccttggcgcacgcggagcactcgtagggcttctcaccggtgtggatgcgctggtgctctatcagggacgagcggttgcggaacgccttggcgcactgggcgcacgcgtagggccgctcgcccgtgtgcacgcgccggtgctgggtcaggtgcgtgacgcgcgtgaaggccttgccgcagtcggcgcagcggtgcggcttctcgcccgtgtgcgtgcgccagtgggacgccaggtacgagccctggctgaaggccttgccgcactcgtggcaggcgtagggcttctcgcccgtgtgcgtgcgctggtgcagggtcaggtgcacgctctggctgaaggccttgccgcactcggggcacgcaaatggcttctccccggtgtggattctctggtgtaagatgaacgctgaacagtagctgaaggccttcccgcagtccccgcatttccacggcttcttggggcctccacctctctcccgctggcggctgtcaggatgcctctccttcgggctctccccaggcgcgctgcacctccgggaactgctgtcgtcggggacactggcttgggtagcagcagggctcgatatggttcttgggattcggctgaattcatcgcgttcctgcatgctgtccccagcagggtctcccttgcaggccacggcctctggctctggacagctttcctggttttcctgcaggtcctcaacctggccctcgtgtttccagtttccttccaactctgcgccctggagggcgacgctcaagagtccctccatcctcgatccctgggctgctgtcttgatctcacatcttttctctgggtctgaaaagaaaaagatagaaaaaaaaattaaatgttgccacttgtcctgagctggaaaaatggctaacagctgaactggtaagaacttagcatggggtccctggacctctgtgccaatgacattttgggtccaataatttggtgtggtgggacccatcctgtgtgttgtgagatgttgagcagcgtccctggtctctccacactggctgccagggacactacccctcaacccctgagttgtaacaatgaaaaatgtctccaggccggacgtggtggctcatgcctgcaatcccagcactttgggaggccaaggcaggtggttgcttgagcccaggagtttgagaccagcaaactgtctgctgcctgggcaacacagcaagatctcatttctacaaatgaaaaaaaaaattagccaggcatgatgttgtgcacccgtggtcccagctactcaggaggctgaggcaagaggatcagctgagctcagaaggttgaagctgcagtgagtagtgatcacactactgcactctagcctgggtgacagtgtgagaccctgtctgaattttctttaaaaagtctccagacactgccaggtgtcccctcccctggggacaaaattgcccccagttgggaatcactgacttaatggaactaaaaacaaatttaaaagatccctgaaaaagaaaaaaaaagcatgaatctgtcagctcttaaaatatggccctgtaatctggtgctgtgaactgaattgtgccccctcaaaatttatacatggaagccctaactcccaaggtgatgctttgtggagatggagcctttgggaggtgattagctttagagggggtcatgagggtggggcccccacaatgggactgttttattttttttttgacatggagtcttgctctgttgcccaggctggagcacagtcttggctcactgcaacctccgcctcccgggttcaagcaattcttctgcctcagcctcctgagtagttgggactacaggtgcacgccaccatgcccggctaatttttgtatttttagtagagagggggtttcaccatattggccaggctggtctcaaactcctgacctcaggtgacccacccaccttggcctcccaaagtgctgggattacaggcgtgagccaccgcgcttggctgggactaatgttttgataagaagaggaagcgacaccagagctcgctgtctgtcaggtgaacacatggcaagaaggcagccgtctgcaagccaggaagtgagtcctcagtgtggtctgaccatgctggcactctgatctcagactcccagcctctagcactgtgaagaaataagtgtttattgcttcagccacctaatctgtgattttttttgtaagctggagctaagataactggaaagacagttttcttttctggggaaaaatcagttgaaactttaattcccagtgtgacagcgtttgatgtggggcctttggaggatgattaggtcatgagggcatcctccttaataggattagcgtccttataagaggagacaccagggggctcacttactctctgctctctctgtcctctctgcgtgtgaggacacagggagaaggcggccatctgtaaaccaggaagagagccctcaccagacagaatcagccaacagtgatcccagatttcacattatggggacactattcaactcactatgctccccttctacagggctccatcagtgaaggagctgcccagggtctcccaggctcagaggttcatgctggctcgtgggcccagggtcgttagagatggtgatctcaagctattgcaggttaccctgtctgctttgcacattttcagtggaaagcagggatctgtttttatatgagcccaggaagtcactgttttttagaaagccataacagaagccatacatatagttacttctagtggggctgtgatgctgaaggatttataccaattgcctggtgtacactggacctgcacgctggcgagaaactcaccactgacttctgatgctttagttctaacagaatgggaagacagatggacaaatgacctcctggtgctgagagagggaaggaggcagctgcctgtggatccactgtgctggggctagccccagaggagggggctcacactgctgggaggtcctttccaggctgtgtggctgcaggtaagtggctacctgctctgaggctctgcctggttttctctctctaaacagggctccagcctccccttctcccgagggacatggcaggtctctcagcaagcttggcctcatgttatgtgtgggctcagcccctcacacacaggcattccctgaaccaactagtaggctgtgtgcatacagcagagagtgctcggcctttggctcctccgggtacactcctgctgctgctggacaggctacgtctgaagcttgtcctccccacttcctgtgtgagatcctaaccctttgtggtggtgctaggaggtggggcctctgggaggtgatgatgacatgaggctggagccctcaggcgttggattcctgcccttataaaagaggacccagaaggctcccttgccccttcctccaaatgaagacacaacaagagggcccggtctatgaactaggaagcagccctcaccagacaccaaacctgccggcaccttgaccttggacttccagcccctagaactgtgtggaaataaatgctgtttctttctttctttctttttttgtttttttgtttgtttgttttgttttgtttttgagataagagtttcgctcttggtgcccaggctggagtgcagtggcacaatgttggctcactgcaaccttcaccttccgggttcaagcgattctcctgcctcagcctcctgcatagctgggattacaggcatgcgctaccatgttcagctaattttttgtatttagtagagatgaggtttcaccatattagtcaggctggtctcaaactcctgtcctcagatgatccacccaccttggcctcccaaagtgctgggattacaggcatgtgccactgtgcccggccaataaatgctgtttctaagccaccagagtatggcattccgtcacaccccaaaggacctaaaatagggctttttttttttttttttttgagacagggtcttgctctgttgctcaggctggagtgcagtgttgcaatcatagctcgctgcagcctgggaatcctggctcaagtgatcctctcacctcagcctcccaaagggcttggatcacaggcaggcaccaccaaccacacctggtcaagacagggcttttgtgtgggctattctttctgcctgacatgctcttcccgcagcgtgtgcctcagcaagaggacaagaggagaccctgagggagtgatgatgtttgtgttcagggtggagaacacagcaagtgcaaaggtcccagggcaggatggtgacaagggtggcagaggaaaggtaaagggggtggggctggacagagcaactgaggtgcaaggcaggggagatgcggtagagtggggtgggggtcagctcacacaggaagtcacgtgtgctggtaagaacttgctggtgggggccaggctgggtcggctcaggtgccacgtccaccggcatccccggagtgtgcaggggtacccacctcgtgtgtagggggagggcaggtgggttcacagcggggttgggtaaacctgggtgttgtgcacacacaaaggagcccaaggggagacacaggcttgcttgggggcagtagaagaaagctgtctactcccagcacttctgacacgtgggctttctccacaccaacaaccaagtctccaatctgctctgactgggaggcacaggcagctaccaaccataaaactgcctcaacccctccttgggtttggtgatttgctcacatagctcattgaactcagggacatgctttatttacggttactggtttccaataaaggatacaactcaggaacagccagatggaagacacacagggtaaggtataaggaggagctcagagcaccatgccctctctgggtgctcgacagccccagagctcggcaaaccctaagtttagggtggttatgggggttccatgacacgggcgtgactgacataggtgtgatgacactggccatcggtgatgaactcaacttccagccctctcccctcccaggaggtaggggctggctgaaggctggaatgctcatcagggctagctcccgtggcaaccagcccatcctaggggcctatcaggagtcctccattagcataaatgtacttgggggtctaccaggagtcctccattagcataaatgtacttgggggcctatcaggagtcctccattagcataaatgtacttgggggcctaccaggagtcctccattagcataaatgtacttgggggcctatcaggagtcctccattagcataaatgtacttgggggcctatcaggagtcctccattagcataaatgtacttgggggtctaccaggagtcctccattagcataaatgtacttgggggcctatcaggagtcctccattagcataaatgtacttgggggcctatcaggagtcctccattagcataaatgtacttgggggcctaccaggagtcctccattagcataaatgtacttgggggcctatcaggagtcctccattagcataaatgtacttgggggcctatcaggagtcctccattagcataaatgtacttgggggcctatcaggagtcctccattagcataaatgtacttgggggcctaccaggagtcctccattagcataaatgtacttgggggcctatcaggagtcctccattagcataaatgtacttgggggcctatcaggagtcctccattagcataaatgtacttgggggcctatcaggagtcctccattagcataaacacaggtgtggttgcagggggcttattaagagttgcagaagacactccttctacccctgtcactcaggaaattccaagggttttaggggctctggtaccaggagctggggataaagattaaacatatatttcttattatatcacaagatcacaggaagacacatgcattacatcacactctgacacacacagggtcatacacaatcatacctgcccagacacacacagacatgcagagacacccaaacccatatccagggacacacagtcgccctcctaacccccatgcaaggaggcaggtgggaagccatcacctgcagccacactcacacatgcacacagggtcccgggcacacgtagctacacacacacccagccccacacgtagctccctgtgtgaagaggtgcacagagacgcacaaggtcacacatgccacctgctccacacaggccggccattactgggacacacccacaggggatggctggacacatgtgcagtcacactcggtggatagagctccagcatagccaaagcccacatgtgcagcgtctccatcatgtgcagatgcacacacttcagacagcacggcactctacaggctcgcacagccaggtcacccatcattgtgctggcaggcacacgggccgagccagcctacacggcggcacacccagacatgcacacgtggggtcacacacctcacatccaggagaactttcagacttgcccaaaggcagccacacgtgtatgtgacatgctgtgatatgcagacaccgcttcacatgaacgagcacataacacaccgataaagtgttacatgcctttacctgcagtcacctgcctgggctggcaccactgagtgagcaggtgcagacacagtgacactcggggacgggctcacaggcagtcacacacctgcaaggcctggcaccgccgagtgagcaggtacagacacagtgatgggctggcaccgccaagtgagcaggggcagacgctgtgacactcagggacgggctcacaggcagtcacacacctgcacctgctggtaccgtcgagtgagcaggtgcagacgctgtgacactcagggacaggctcacagccagtcacacacctgcacggcctggcaccgccaagtgagcaggtacagacacagtgacgggctggcaccgccgagtaagcaggtgcagatgcagtgacaggctcacaggcagtcacacacctgcacctgctggtaccgtcgagtgaccaggtgcagacgctgtgttactcagggacgggctcacaggcagtcacacacctatacgggctgacaccgctaagtgaacaggtgcagacacaatggcactcggggacgggctcacacgcggtcacacacctgcaggaacacgcgcacactacacaccgttgctctcgcctcccggtatcaccttcgaacgcgctggccggccccctcctagcctggtgcagtcggctccgcttctactcagtctcgggtcctcctgggccaacgcagaccctggtgcctccttccttagacgagctaaggtcaagacttctgctgctgcggaggagcccgcgcaccaggccggggtggactgcgcctgcgcatcgggcccgcctggttcttaggaactacgactcccagggggcgctgcgcgctcgccggcaccgcgactaaagcttgcaaagcctgggtcatcgaaactacaactcccagaaggctaagcgtctgcacacgctaggtccgcagggcgctgacccctgggggcccgaggagcgccgggctgctgccccgagccccgcccactacagcctcagtgcatggcggtgggcgcttccagtaactcaggggtgggacttttttcttgctcaggggatgaggccgagcccacaggcttagaaagaaggaacttgagtccgggcacctgtcatcccagcgcttagggaggccgaggcgggtggatcacctgaggtcaggagttcgagaccagcctggccaatatggcgaaacccccgtctctactaaaaatacaaaaattagccgagcatggtggcatgcacttccagctacttggaaggctgaggcgggagaatggcttgaacctgggaggcgagggttgcagtgagctgagatcgcaccactgcactccagcctgggtgacagagcgagacttcgtctcaaaaaaaaagaagaagaaagaaggaagctgaggttcagacaggctaagtccctactgcaggctgcggaatctaaaaaggtaggtgccagggtttgcaacccacacttttattttggtctcaggtagctgatgtcattccagtctatggcaaagaaggtggcaaatccattaacatagatgaagaatttcattttactttttagttttatttatttatttatttttattatgtatcatgcttttaatacaaactttaaaaaatctggaacaatagaaactgtacagatttgatcaatctttttgttttgtttttaaactaaaatctctaaacacaccaatgtcctattccaaaatattgcacaacattctgaatacaaaacccttgattgtattcctccttcactgaagaaaaaacttcatgaccctgctccccgggctcctctccaggcttgcgtcaatgcccccttcccatccctagggagaaaactagagaatctataactcactgcattgagaaaaagacatcattctggactaacagtttccattcttcagaagataatccaccttttgatttgttcctgggaaacagggatagatagaggatggggaaaggggagaaaaggttttatttctcctcttttttttttaaagtttgtttttcctgaaaaaatatgtttctctcatctttttaagaaaaaatcttgaaaagaaaaaaattgtttttacgttagaaatatacatatattatatatacctcttacattttacaaatgtagcaaattattcaatacaaacggacaccaaaaaatgtaaaaaataaaaaaaagttttcctaagaaccaggtaaattagtgcagatttctgtttttgttttcttaaaaaaaataaaattgaagcaaaagtgcctagatttgagacaagacagactgaactgggcccaagagcccagcactggagtcatgctcctgaacacacatttttcttcgtatttcaaaagacacaaaggggttggtctccccccctctccctacatgtgagaaacaagcagacctggtgtgggtgggtgcctgtgtgtgtggatgggaggagggatagaaggggatgtaaggcagcatccaacctttcccagagagaagctatctgctgggcctgtcacctgtgtgggagccgaggatgagggaaagggtggcccagactgggctggcccctgagaagtctaggggaacagatggtgctgggctgagaagccaggacattgcctgccgggggaggtagagctggtgcctactgcagggagaggaggctggcagtgccggcctgggctggacccactgccatagcagttgcctacttggggtccctgggtaggatggagtgggtggggtgccaggggctttggtgctttctggtgatgggaccctgatgccaagtgcccactttgcaaagatgaaaaagttcatgaccctgctcccttggctcctgtccatgcttgcctggcctcctggggttggaggaacaagctctctcctggcagaggcaggagagagttttattttttagaaacagtttcgctttgttgcacaggctggagtgcagtggtacaatcacggctcactgcatcctcgacctccccaactctagtgatcctcccatcttagcctcctgagtagctgagattgcaggcatgtgccaccacactggctaacttttttttaacttttattttttgtagagatgaggtgtcgctatgttgccctggctagtcttgaactccaatccttccacctcggccttaaataattttaatagttgacatgcacatggcatttactattggccggcattattttaaggtgcctgctctgaaggaattctgttagccttcctaaattattcccttggccattggaaacataggcatgagatcatttttagataattggaaaagcagagaaatctgtgaagatagaatgggaaaaaaaatgcatttcactaaaccaacatgccattgattgtgagattccacattactttatgtagccccacggctgcccttaaaccatgacacatgctttatttacagttcatattttacttattcgtagacctcaagaggcattctgtgcttccctcttccttctggaagcttcatgagaagggacattttcctcaaaggatggacaacagaaacaactcaaatattcatttcctttaaatatggtttttaagacaattttctttagaaagccacatttacctgttgggggttgatttatgctcacccccctcccaaatatatgttggaatgctaaccccctattcctcagaatgtgactttatttggagacaggttctttacagaggtaataaagttaaaatgagtaaatagggtgggccataacccaaaatgacagctgtccttataaaaagggtgcatttgcacgcagagacacgcatagagagaacatgatatgtagaggcacagggagaaggccgccatctgcaaaccagggagagaggcctggagcaaattcttcttcatggctcttagaaggaaccatccctgcctacaccctgatttcagatttccagcctccagaagcgtgaggcgataaatgtctgttgctgcagccacaggttggcggtgctttgctgcagtagccttagcacctgatagatggtctctttacatgtcaagcacattgcagcgcacatttgacacacagggagatggaagctcctggaggataagtgttttgtctgtgattttgaaggttgcaagtggaggaactgggattcgaacccctctctgtgtgatgcctatgcctcctctgtgttaacatttatttttacttatttttattttttagtttttgtagagatgagggtctcactatattgcccaggctggtcttgaactcctgggcccaaacgatcctcctgccttggcctcctggtcttgggattacaagcataagccactgtgccaggcctacactttaaagcactttgcctctttaaagcactttgcctctttcatttcctagcctggagaaaatgtacttctgtggtcactaagaaaacaccttcacaatcaggcaaaaatgtccccagaaaatgctggcttgggctgctgaggaaatgcacaatcaaatcaggccacacaacgtttcagagaccctgaggcagggactccatgtcccagctatgtttgtcacacaccagtaggcagcctctacccaggggtggaagattctagacccagctataggctctggcaaccagggcaggcagctccttccaggaaccggtttctgtggttttctttggtcacttccattaagtcttaaacaccccctggaagaaaatgaaagtgtgacgttgaggaacgtgagatcagatggtggagtagttttctagagccaccataacaaagcatcacagaccagggtcttaaacaatggaaacttatttcttcacagttctcaagaatggaagttcacgatcaagttatggccaaggttggtttcccctgatgcctctctccttggctggcagacgaccatcttccccatgtcttcatatggtcttccctctgtgtgtgtctgtgtcctaatctctcccacactcttttttttttttttttttttttttttaagaatgtcagccatgggccgggtgtggtggcccacacttgtaatcccagcatcttaggaggctgaggcgggtggatcacctgaggtcaggagttccagaccagcctggtcaacatggcgaaacaccatctctactaaaaaaaatagaaaaattagccaggcgtggtggcaaatgcctgtagttccagctactcaggaggctgaggcagcagaatagcttgaacccgggaggtggaggttgcagtgagtggagatcacgccactgcactccagcctgggcgagagactgagactccatctcaaacaaaaaacaaacaaacaaacaaaacaaaaaacaatgtcagtcatattggacttgggacccatgctaatgacctcattttatcttaattccctttctccatctccaagtacagtcacattccaaggaatggggggttaggacgtcaacataaaatttggtggtggggcacaatttggctcatcacaatgggtaaaatggggcattaagctcacatcctgaatctaaaacccacaagaggctggagtactttgctttccctggttcatgatcaccgtgctaactggagtgtggtcaccttgaaattggcttagaggaagatttatgatatcctcccaagtcaagggctcaggctctaaacaccggcttaaataagagctgagtgaaagtccacaaatcttgttacatcaacttctgctggactttgttggacagatgctgaagtcctctgtggagaaacaccttagcaacttgtcaaagtagttcatttctagagatctcatgaccaatgagcaattattccagattccctgtgggttgaaatattctgaattttatgctgcattatcattataactgggtgatctctggcttagcatcacgtttgtgacctcctggcttctaaatgtttagtgcccacctggcctctaccaccaaaagatcctattattcccaccaagctcatggaatccaatttcctcgtggcattttctccatcctacaatggacagcagccacagggctcttcaccgatccagaagcctcttcaccttacagtgttggtgaggcaagtctcccatgggtcctctgggagtatgtttaagggtacctgggcagtttgcctgcatagaccgatgtctacattcacgtttccttaagcttccagactcccccctttaccgtgtactaggaaatggctgggattttgacctcaggggggttgccagtccattccagctgctatcacaagacagcataaacagggcagcttataacgagcagaacaggtgatgtatttatttatttaaacagagatgaggtctccctgtgttgcccattctggtcgcaaactcctgggctcaagtggtcctctttcctcggcatcccaaagcgctgggattacaggcatgagccactgtgcctggccttgaaaagaatcattctgaaggctagaaagcctaagatgaaagtgccaggagattcggtgtctggtgaggacccaattccttgttcgtagatggcaccttcttgctggctgtgtcctcacagggtggaagggagaaaagagctttcttgggcctcttagaattatgctaatcccattcatgagggctcagccttcgtaaccaaatcacctcctcaaaacctcacctcccaacaccatcaccttggtgattaactttcaacataaaagtttttggggggtgacacacacattcaggcctacagaggtggagtgatctgcagatgactgttgattcaggcgtcaccgctccaacactggagactctttttttttttttttttttttgagacagattctcgctgtctggagtacagtggcacgatctcagctcactgcaacctccacctcaagcagttctcctgcctcagcctcctgcgtagctgggactacaggtgtgtgctaccgcgcccggctaatttttgtatttttagtagagacagggtttcgccctgttggccaggctggtctcaaactcttgacctcaggtgatccaccctgctcagcctcccaaagtgctgggattacaggcctgagccactgcgtccggccctggtcccttgatctaggatttcagcctccagaactgggagagaataagtttctgttgtttaggtgaccgagtctgtggcactttgttatggcagcccaagctctctgatatagaggctaagcaactgccatgcttcatttacttaatcagctgtgggtcggcactgtgggttgggtttagtcaactagttcttctgtcttggctgggcccactcgttcatctgtgctgagctgggttgagcggcggctggcccatctgtagcctctcatcctctgccaggacagcctagggtcatttccatggcagcctggcagggttccgagagagttagtaggaaccgtcaagcccgttgagcacaaggctctgtactgacagctttgcacttccactgcaagctactggccaaagcaaaccacaggtgcagcccagatttgagggatgggaaaatggccacaggacaaacggcatgggttcaaggaggggtggaatactaggatgagttttgcaatctgtcatgtgcacatacacacatgtggtgagttggatacagcctggtgtgtgtaattacaaacacccctctaataaaaatgtgcaaagatctttcaattactcaagtgatgttatttccaaacctttcctatcagactcaaccccctttagatacgattattctcatgctggctgggcgtggtggctcacacgtgtaatcccagcactttgggaggctgaggtgggcagatcgcctgaggtcaggagtttgagaccagcctgatcaacatggagaaaccctgtctctactaaaaatacaaaattagctgggcatggtggctcatgcctgtaatcccagctactcaggaggctgaggcaggagaattgcttgaacccgggaggcggaggttgcagtgagccaagatggtgccactgcgctccagcctgggcaacaagagcgaaactccgtctcaaaacaacaacaaaaattatcctcatgctaaaatgtattcccaactatgacttgaatttctctatttattggtaaaagaaaaattcggccaagcgcggtggctcacacctgtaatcccagcaccctgggaggtcgaggcgagaggatcatgaggtcaggagatcgagaccatcctggctaacgtggtgaaaccctgtctctactaaaaatacaaaaaattagctgggcgtggtggcagccgcctgtagtcccagctgctggggaggctgaggcaggagaatggcgtgaacctgggaggcggagcttgcagtgagccgagattgcgccactgcactccagcctgggtgacagagcaagactccgtctcaaaaaaaaaaaaaaaaaagaaaggaaaagaaaagaaaaaaaaggaaaaattcagaggtggcatgtgcaaaacttgcaccatacatttatatagctgatactcaattgaagaacatgtatgtgattttcagattcttgctgtgataaatgatgtttctgtgaacatggtttttaccagtttttaaaaatgggtgatataataaatagaatgtgaagctgtatcagtcagggttcagaaacagaatcaataggagatactatgtacctatccacatatatattatagatgtatatattaatagacacaaattgatcacgtgagccaattccttaaaatctttctcttatctctctctgtgttgtctatatgtatacatatataatagagattctggtggaaggctctgagatcaagggggaagggaggcaggccatgaaaaagtcactccaagacagattggggtcctcagctctgcagacccaggaaattcagatatatgtgtgtatatatacctgtccctatctatctatctatctatctatctatctatctatctatctatctatctatctatctatctatctatccatctgtctatctatctgcctgcctgcctgcctgcctgcctgtctgtctgtctgtctgtctatcatctaatgtatgcagaggttgagatttattttaaggaattgtctcacacagttgtgggagttggtttgtagggccagccagcaggtgggaaactcaagcagacattgatgctgaaatcttgaggcaggatttcctcttctctgggaaaccctgagttttactcagaaggccttcaactgattggatgaagtccacttacattaccgagggcaaccttttcttaaaaaaaactggttgtagatgataaccacatctacaaaataaccttcacagccatgcctggattagcatgtgattggattaccaggcactggaccccaaccaggttggcccataaaactcaccgttagcaggagtgttgtggggagtgggcaggaaggggtatgtagaaagaaatgactgaggaagactgatgagataaatattggttctaagtacaattaggaaagatcaccaagtcctactttaccaaaaaaaaaaaaaaaaagaaagaagaaagtaggccaaatgtaaaccatgatacatgttattttgttatttattcatttttttttgagacggagtctcgctctgtcgcccaggctggagtgcagtggcgcgatctcggctcactgcaacctccacctcccgggttcacgccattctcctgcctcagcctcccaagtagctgggactacaggcgcccaccaccatgcccggctaattttgtctttgtatttttagtagagacggggtttcaccgtgttagtcaggatggtctcgatctcctgacctcgtgatctgcccgccttggcctcccaaagtgttgggattacaggcgtgcaccaccgcacccagcccactgctttccatttttaaggtctttatctagaattagaattgctggatcacatgacaattttatttttaattttttttggaaaccttcagaccattttccagaatgactgcatcataccacattcccatcagcagtgcagaagggttccaatttctccaaatcctgccaatatttcttacattgtgttttatggatagtagccatgttaatgaaagtgaggtggtttcttattgcaaagatgatgatcttttaaattttttcagtcgtaattgcttaataatagaatgtgtggctggacacggtggctcatgtctgtaatcccagcactttgggaggcccaggcgggcatatcatgaggtcaggagatcgagaccatcctggctagtacggtgaaaccccgtctctactaaaaatacaaaacaaagaaaaaaaaattagccaggcgtggtggcaggcgcctgtagtcccagctacttgggaggctgaggcaggagaatggtgtaacccgggaggttgagcttgcagtgagccgagatcgtgccactgtacttccagcctggaggacagagcgagactctgtctcaaaataaataaataaataaataaataaataaataataataataatagaatgtgtgtgcctgctgggcattctataccttctcaaacattggcatcagactggactatgccacccgcacttcctcatccttgttgattttcgtgggtttgattcacagcaaacactgccaacccagcatcacaaagcatgatgttatcaaaggaagtgtagagagatcttaggctgaaactgtggaaccctggaggtggaggttcatgtgtgtcagatgtctaatactgctacgcgtccctaaaattgaaagaatcagggtacctgggctgacagttgcagctgtggggatagagaggcagaaaagcaggaggtgttcattggagggggagagaacggaagagctcccctggtcgcctagcaacgcggagacgccccacaggggactctggtgagaacaggcagtggcagaggggctattctgcctcagccaaatgtagctgcagagactcaggaaagtaatgtagatgtagaaattagaaattaattaatttctttaattaataaccctcagttgtatattgagacggtctccactgattttttcatgtctaccgtttgcatagttttaggccagtaggtcccaaaatgtagtttaaggactcctgggggaatcaagaccctttctgggggtccataattcccaacattttcctaagaaaattaagaatttacttgcctaccgacttttcaatttatctgcatgatgtaatactgcaaatgtttaagtggcagatttgagaatctagctgtcttgtactaaggcgaacattaaagaaatttgcaaaaaaggccgggtgcagtggctcacgcctgtagtcccagcactttgggaggccgaggtgggcggatcacaaggtcaggagtttgagaccagcttggccaatatggtgaaaccccgtctctactaaaaatacaaaaattagctgggtgtggtggcgggcactcgtagtcccagctactcaggaggctgaggcaggagaatcgcttgaacccggcaggctgaggttgcagtgagctgagatcgcgccactgcactccagcctggcgacagagcgagacgccgtctcaaaaaaacaaaacacaacaaacaaaaaaacccaaaccctcagttgtatattcccaaacccatcctcagtggagacggtctccactgattttttcatgtctactgtttgcatatttttaggccagtagttcccaaaatgtagtttaaggactcctgagggaatcaagacctttttgggggtccataattcccagcattttcctaagaaaattaagaatttacttgcctaccgacttttcaatttacctgcatgatgtaatactgcaaatgtttgaattaagtggcagattggagaacctagctgtcttgtagtaaggtgaacattaaagaaatttgcaaacatgtaagacaatgctaattttcttactaattctttggaaaatactgtataattgcctataaaaattgtgaaatgttaatatataataagattattatttttaagttttaagtgtataattttctcagcttcaatatgtaattgtatgtaaatatagatcatacaaagaaaaaattttaggggttctcaatatatttaaaaaatataaaattggcctgagatgaaaaactttaagaattactttcttaggttaagtttttagatatcagctggctgggtggaaggaatgtgcatactcggtgcttttcatacacggtgtcaaattcccatgaagctatccagttgttccgtggctctaaattctcatgggaaatgtaacccagatctgtctcgctgttatcaatttttcacgctgcctaccataattaacccagtgaagaatttcagtgaaaggtagattgagctatttgtacccagccttccagagaattccctttatataggataagtttaaattctttttggggggccggcgggggtgggggtggtggtgtctggaaaggaggatcataggataagtttaacattcttagatgagaaagtcaaatgtagattcctgagttcacaaaccccagccccaacattcatgatgtgggtgatcctggggaagacatctgtccttctgagcccacctccttcacttagaaatgggcactgggggtggggaaggattggacctggtgccccccaagacattgtaagaatcaagaaatagtagctaggtgggggtttttgggcatttctaccataaatatgaaatataattttattttaataatgtgacaaataagataaagagtcatcttcttatttattattattattattttttgagatggagtcttgctcttgttgcccaggctggagtacagtggctcgatctcggctcactgcaacctctgcctcccaagttcaagcaattctcctgcctcagcttccccagtagctgggattacaggcgcccaccaccaaacctggctatttttttgtatttttagtaaagacggggtttcgccatgttggccaggctggtcttgaactcctgacctcaggtgatctacacgcctcggcctcccaaagtgctgggattacaggtgtgagccaccttgcctggccgagaatcatcttctttgtgaatttttccccaaccactgtatcgataatcgttaaaacaaattcctcctcaatgctgtcataagaggtatgctggttctcttgttccccatccctcatggggatataactgactgtttacctgtttcccccaccaggtcatgaactctgagagtttgagatgagcctctaaaagctgtatcaatagcaccttgcactgttgaagcaggtaagtgttttccttgttacttcttaagttcagttggaaacccaacatagcaaatcctctagaatgcagctgaagcagtactaaggctgggtgtggtggctcatgcctataatcctgtagggaggcaaaagcgggaggattgctggagcccaggagttcaagaccagcctgggcaacacggcaagacctggttctccacaaaaaggaaaaaaaaatgctaagaggcaagtatatagcaataaactcctacatcaaaaaagtagaaacatttcaaataagagattgggggcagtggctcatgcctgtaatcctagcacttttggaggccgaggtgggtagattgcttgagaccaggagttcgagaccagcatgggcaacatagcgagaccctgtctctacaaaaaatcagaaaattagccaggcgtggtggtgcaagcctgtagccccagctactcgggaggctagggtgggaggattgattgagcctttgaggtagaggttgcagtgagctgagattgtgccattgcattccagcctgggtgacagagctagaccctgtctcaaaaaaagaaagagagaaagaaagagaaataaataaagagagaaagaaagaaaagaaagaaaacaaacaaggaaggaagaaagaaaaagaaagagaaagaaagaaagaaaaagaaaaagaaagaaagaaagacttcaataacctaaggatgcacctcaagaatctaggaaagcgagaacaaaccaaacccaaaaattagtagaagaaagtaaataaagcgcagagcagaaacaaataagattgagaccaaaaaaatacataaaagatcaatgaaaaaaaaattgcttttacatcatggtcttgaccttgcagggatggcccctcccagttttagccaatttctcgagtgataaataacttgcttgagagcatgccttttatatataaaccaccaatccagagcccacatcccacccactctctaacagggcgctatactcaccccagggccaggtatcacaccactaagaacagcccttttccccagatcccactgaggttatccaaagtgaccagccctaacctatgaaatctgcctcacttcttcctttccacagaaactatagcaaagtcttgtccacacccacatttcactcacctccttctgactcctggcagatcctggcgctttccccatggggctgcctgagctgagacgggctctcttctcctggaaactgagtaacacaatttatttcaatgacagtcacttcctcatctgttggcctcagcgtacctccaattttccattacacaataaatggaaaataatataggccgggtgtggtggctcacgcctgtaatcccagcactttgggaggccgaggtgggtggatcacctgaggtcaggagtttgagaccagcctgaccagcatggcgaaaccccatctctactaaaaatagaaaaattagctgagcttcgtggctggagcctgtagtcccagatacttgggaggctgagccaggagaattgcttgaactcagaaggcagaggttgcagtgagccgagatcatgccgctgcactctagcctgggagacagagcgagactccatctcagaaaaaaaaaaaaaaaagaaaattgaattgggccagcccctccacacctgtgggtatttctcatcaggtgggacgagagactgagaaaagaaatgacacagagacgaagtatagagaaagaacagtgggcccaggggaccagcgctcagcatacagaggacccgcactggcgccagcccctgagttccctcagtatttattgatcattatttttactatcttaacaaggggagcgtagaaggacaacaggtggggagaaggtcagcagggaaacgtgcgcaaaggaatctgtatcatgaataagttcaaggaaaggtaccgtggctggatgtgcacgtagactagatttatgtttctctttacccaaacatctcagtgtagcaaagagtcacagagcagtattgctgccagcatatctcacctccagccacagggcggttttctcctatctcagaatagaacgaatgggaatgatcggctttacacccagatattccattcccagggacgagcaggagacagaagccttcctcttatctcaactgcaaagaggcctccctctttcactcctcctcctcagcacagaccctttaagggtgtcccgctgggggatataaggtctttcctttcccatgaggccatatctcaggctatctcagtgaggggaaaccttggacaatacccaggctttcttgggcagaggtccgtgtggctttccgcagtgcattgtgtccctggttaatcgagactggagaatggcgatgacttttaccaagcatactgcctgcaaacatattgttaacaaggcacatgctgtacagccctaaatccattaaaccttgattcaatacagcacatgtttctgtgagcacagggttggggctaaagttacaggttaacagcatctcaaagtagaaaccattttttttggtacagatcaaaatggagtttcttatgtcttccttttctacatagacacagtaacaatctgatctctctttcttttccctacagaaaataatatggagatgacagtgtcttgtacaactgtgtgatggcttgtctccccatgtctgtgtgattgtgtgtccttgagtgtgttggatggagtgtccttctgtgtgtgtgtgtctgtgtttctctctgactctgtgcggttgagggcgtgtggtctctcacgtatgattggatgtgactgcggatctccatgtgtgattatgagtcacgcttcaccggaaagtttctatctcagcctggatgagccacaggaatgtgtgtgttcaggtttgctgtgtgtctgtgtctgtttgacctgggctgttgtgtgtgcatcttagtctgctgtgttacatcatgtgccgttgtgtgtgactctctctaggacagcccgagtgtgactgtgatcatagaggggatgaagccccctgtgtgtgggtttgtgactgtgagtgtgtgctccagttaggagggttttgagcgctcatgtgagtgtgtgggaagattgtggattaatttgctatggctgctgtaacaaaacaccacagactgggtggcctgggtagactgggtggcttaacctaatactaatagaagcttattttctccctgtcctggagcctggagcccaagatcaaggtgtcgaaggagcctgtgttcaggaggcctctctccttggcttcttggcggccgtattctcttggcgtccacactaggtctttttttttgtatgcatccctggtgtcactgtgtgtgtctaactccctcctctataaggatgccagtcaaatgggagtagggccagtccaaaagcctcatttaatcccctcttaaaggccttgaccccagatagtcacatcctgaggttctggagtttagggaatcaccaaataagttttcaggagaaagcagtgagcccataacagtgtgtttgtgtgtggatgtgtggtcatgggagatgctgtgaaggttgccattgtgtccacatgactgtgcgtgaaacagtgattcatgcaattatgaaacccatgttgtgtgagttccacaagaccaaggcaccttttatccactaaatgtgcacatgtctgtgtgtgtgtgtgagtcccacaaaactcaggcatctttcatccactacctgtgcatgtgtgtgtgtgtgtgtgtgtgtgtgtcccacaagacccagacacctttcatccactacatgtgcatgtgtgtgtgtgtgagtcccacaagacccaggcacctttcatccactaaatgtgcatgtgtgtgtgtgtgtatgtgtgagtcccacaaaactcaggcacctttcatccactaaatgtgcgtgtgtgtgtgtgtgtgtgagtcccacaaaacccagacacctttcatccactaaatgtgtatgtgtgtgtgtttgtgtgtgtgtgtatgagttccacaagacccaggcacctttcatccactaaatgtgcatgtgtgtgtgtgtatgagttccacaagacccaggcacctttcatccactaaatgtgcatgtgtgtgtgtgtgtatgagttccacaagacccagacacctttcattgtgtgtgtgtgtgtgtgtgtgtgtgtgtgtgtgtgtgtgattgaaggagatactatttgtggataaataaattgaaacctcaggccactttcctgtcttatatcaaccttattagaatcctgcccaccccaaatgcgcaattccataggtagagcaagataggtcctaggatccatctgggaagtgcccaggatgcccttcctaggatgcttggagacaggattggagcaggtgatggaagcatgggctcagggccaggcagtctggagacctctcctctctgagcccagtgttgcctgtaaaatgcagacactcctaggacctcactcacagccaggggtgcgggagatggccgtgcatattgtactgtgcacttcggctcctgttcaaaaggatacgtgggatgtgaaacccagcctgcgctctctccacagctgtgtccatgccagggccagaattcccactggagtatgacattggtccatccaaagtcccagagcctaccatggccatgtgcaccgttgtcacttggggaaaaaatcttcttaaacagataaacaaacatgtgcaaatgcatatattttagagtatcatcttgtttttaagcctgggcaacatggtgagaccccttctctacaaaaaacaattagctcggcgtggtggtacaagcctgtattcccaactactcggggactgaggtgggaggatcgcttgagcctgggaggtcgaggctgcagtgagctgaggtcgtgccactgaacagagtgagaccctgtgtaaaaagaagaaacaggacaaaacaaaaaccaaaaaccaaatcttaacttttgtccgctaatttgaaggaacgcgtatgaaatcacgttgctgtcactagatggcacttttgcaccatgaaaaaaataggctctaattattatttttttttttacttttcaattttcaattgtggcaaaatacatattacacagaatttaccatcttaagcattttgtgactaatatgtgaaagatatattactaatatcataagcctgtgatatatgccttttttatttttttaaactatggtatttatcattttaaatatagtcatgaatcgacaacagggatacattctgagaattttgtggttaggcaattttgacattgtgtgaacatcttagagtgaacttacaaacacctagacggtgcagcctactacacacctaggctctgtggtatagtctgctgctcctaggacacaaacctgcgtggcacgttgctgtactaaatactgtaggtacctggaacacagtggtatttgtgtatctaaacatagaaaaggtacagtacaaatttggtactatgatcttatgggaccgctataatatatgagacctatcattgactgaaatgttactatgcacctcgtgactgtatttttttttttttttttgagatggagtcttgctctgtcacccaggctggagtgcagtggtgccatatcagctcactgcaagctccgcctcctgggttctcaccattcttctgcctcagcctcccgagtagctgggactacaggcgcccaccaccacgcccggctaattttttgtattttggtagagacggggtttcaccatgttggccaggatggtctcgagctcttgactttgtgatccaccctcctcggcctcccaaagtgctgggattacaggcgtgagccaccacgcccggccatgactgtattttgagtgtgcatcactattaagtacattcacttgttctgccacaatctgcaccattcctcttcagagcacctttcttcttggaaaacaagaactctgtgcctattaagcaataactctccatttctcctccttccagcctctggaaaccaccctttttatttttcattcaggaattctgactcttctaagtaccttgtatacctggaatcatacagtattttgtccggttgtgatgggcttatttcaatgaacattgttcctcaaagttcatccaagtcatagcatgggtcagaatttcctttctttttaggcccgaataatatgccattgtctgtatagaccccatcttgcttatccattcaccaatcgatggagacttgagttgcttccactttgactattatgaataatgctgccatgcacgcggttgcacaaacgtctctttgattctctgctttcaaaacttgtgagtaagattcagaggtaaattgctggttcatgggtaattttatttctgttttttcagaacagtcggatggtttcccaccacagctgcatcacatcacgatcgcaccaacggtgcaggtgtttcagcctctccaaatcctgtcagtgttgttatattctgtttaacggatagtgaccatggaaacggcaatgagttagttccttatttctttgccagggaaaatattgctttcatttttaatacttattacttaatcatggtatatgtctttggttataccgtggcaatggctactgaagagtatcctgacacatggatgggggtcaggtcttgacctctggggtgctttattgttagggctgttgttagagttggcagcagttggatgaataatggaatatgatgaggtggaagttgtaattgattttttttttttggaaacagagtcgttatctgtcacccaggctggagtgcagtggcatgatctcagctcactgcaatctctgcctgccaggttcaagcaattctcctgcctcagcctcccgagtagctgggactacaggcgcccgccaccatgcctgggtaatttttgtacttttagtggagatgtggtttcaccatgtttgccaggctggtctcgaactcctgacttcaggttatccacctgcctcggcctcccaaagtactgggattacaggcgtgagccaccacgcctgcccaactgatttttatattatggtatattatggaaaattgtgtaatttttgagggcgaggaggtaggattattgtgtgaagattctttaggtgaggcagccttgtatagttacagatgctgattggtggtggttgctggtcgatctgtatttgtgagcatttatcttgcaattgagcgtactcaggggaacaggttagataactaaaaatagagttagaagagacaggataaggaaagagaagaagtagagtttaattaggcctttttgggcggatatgaaagtggaggctgaagtttggatttggacaatgttttttggtattgatttctctagtcagattagtctaatagaagagacactaaacattgacttgtgtctagatttgtgtgcggggttgtatggtgtactgtgattggataaaaacctagtataggccgggtgtggtggctcatgcctgtaatcccagcactttgggaggccgaggagggtggatcacctgaggtcaggagtttgagaatcagcctgactaacatggagaaaccccatttctactaaaaatacaaaaattagctgcgcgtggtggtgcatgcctataatcccagctacttggggaggctgaggcaggagaatcgcatgaacccaggaggtggaggttgccgtgagccaagattgcgccactgcactccagcctcggtgacagagcgagactctgtctcaaaaacaacaaacaaacaaacaaacaacaacaacaacaacaaaaacctaatatatttgagaacttgaatgtttgtgatgggtattcaagtttaaagtcattggttatgagattaagatctgttgctaccgagaagcccgttgggaattgcacagcttctcaaaccttggacccagattggcccacgccaccctcactcctcatccatgttgatttcagttggttattgctgttcttcacggtgaccactgacactccagcaccacaaagatgtcagcaaaggaaatgtagaaggatctaaggtggagactgtgaacccctggagcctttagttcatgtggtgtcaggagatattgaatattgccgttcttcccttaaatttcaagcatagaggtaactctgcagacacttgcagctgtgaggatggagcagaaggaatgctgtacgtgttcattggagggggagagaatggaggcgctaatctggttgccaggcaatgctcagtgtccttggagatgactcatggtggaattagaatgagaacacgcagtgggggagggactcttctgaaccagcaaaatgcagctgtagagactaataaactgtatggaagtcccacagtcttccaaatggataatctgtcatttgtatattcagataatctccatttatattttcaggtctcttatttgtatatctcccaggccactagttctcaaaatattgttcaaaacctcatggcagaatcaagatcctttcaaaaggcacacaattccaaactattttcctaggaacattaagattttatttgccttttctcttcttagctttttctgcaagatataatgttccaggtgtttgaattcagaagatgattggaggggattaaagggagttgtaaaatgttagacaaggctgggtgtggtggctcatgcctgtaatcccagcactttgggaggctgaggcagacagatcacctgaggtcaggagttcaagaccagcctggtcaacatggtgaaaccacgtctctgcaaaaatacaaagaatacaataatagacaggcatgatggtgggtgcctgtaatcccagctactcgggaggctgaggcaagagagttgcttgaacctgggagatggaggagccgagatggcgccactgcattccagcctgggcgatggagcgagactccctctccaaaaaaaaaaaagaatcccacagccccaccattgacgatgacctgtccatggtgttgaaggacccattggatctatgaactcttacacaggtaagggaggtagttgatgcctactgacttatgcaatggcgacttcaaagtatatttctaaaataaattgaaaccaagattccttgtttgataaccaagaaaagaagaccccaattgggtcgtgttctgcccacatcttcacataaagactgattatgcatttatctcatcactcagcattagggtagtaagtgccatgtgttagcctcctcctgttgggatctgagggccacaaattatcttttcagtgacagctgttttctgattgattgacatcaccttacttcatattttctatgaaggatccatcttttacgtcaatgtggaggtgaaagtttcctgagcgacggtttgatagcccatctccctatgtctctgtgattgtgtgtccttgactgtgttaactgtgtgtccctctgtgagtgtgcgttaccttgtttgtggttgtatttctctatgattctgtgtggttgagaatgtcttgtcttgaatggatgattggatataactatgtgtatgtgtgtgtgtgtgtgtgtgtgtgtgtgtctgtatttgtatttgagttcaaataagcctgcagcacattgtgtgtttgtgtctttctgtgtgaatgtgtctatgtttgatcaggaaatgctggtgattcttcatcttgggtggttgtgttttatcgtctgtcattgtgtgtgactctaagaactgtccacatgtgattgtacttgcatgagggatgaagctccctgtgtgtgagttagtcacggagtttgtgcactggttaggaaagtttgcatcttgagcgtgtgtgaaagtgtatatactaatttgttagggctgccaaaacaaaacgccacatcccgggcagcttgaacaacagacatgtatctacttacctttctggaggctgaattttgagattaagatgtcagcagggctggtttctcttgaggctgcctctgtagattgtgaccaatgctttcttgccatctctaacagtctttcctgtgtgtgtccatctctgatgtctctttgtgtccatattgctgcttctataagaagaaattggattagagcccaccctaaggacctcatttaacttaatcatctctttaaaaaccatatcaccaaatacagccacaatatgaagtactgtgtttgggaagaggaggcagtattcagatcataacagtgtgtttgcgtgtggatgtgtgcatgcttaagaagtggtttgaagaccatttattctgcatggccttgcgtgaaaacatgtgattcatactattacaatctcctgcatataagctaggctagcttagtgtgtgtgtgtgtgtgtgtgtgtgtgtgtgtgtgtctgtgactttattggagttttggagaatacttcagggacatacaaattgggttctatttccactctccctgccttatacctacttcactaggaccctgcacacttcaaaagccccatccagaggttgaggaacagtttcagatctggactctcttctctgggaagtgcccagaatacctctccttagatgctcagagacaagatgggagcaagtgatggaggcatgggtccagggccagacagcctagagacctcccctctctgagcccagcgtcctccactgtaaaatgcagacgctcctaggaccttactcacagccagggctactggggatgatgggatgcctgtgcatattgtagactgcactgaggctctgatccaaggagatgacctggatgtgaactccagcctgtattctctccataaactgtgtccaagccggggcttcaggcttcctaccatagcgtagcattgatctctccaaagccaggaagcctaccatgcccatgtgtgcagttattgtcattttggggaaaaaccttattaaacagaaaagcagacttataaaaacatacccttagccgggcatggtggtatatgcctgtaatcccagctattctggaggctgaggcaggagaattgcttgaacccaggaggcggaggttgtggtgagccaagattgtgccattgcactccagcctgggcaacaagagcgaaactccatctcaaacaaacaaacaaacacaaacaaaaaaatacccattttggcagggcacggtagctcacgcctgtaatcccagcactttgggaggccgaggtgggtggatcacctgaggctgggagttggagaccagcctggccaacatggtgaaaccccctctctactaaaaatacaaagattaacaggcgtggtggcacacgcctgtaatcccaactacttgggagactgaggcaggagaatcgcttgaacccaggaggtggaggttgcagtgagctgagatcgtgaaactgcactccagcctgggtgacagagtgagactctgtctcaaaacaaaaaacagaaaacaaaaaacaaaacaaaaaaatactgtcttaataatatctttttgtttcctcctttcttcccatttgaaggaatgtctgggaaattttcaaatgcctttgcttacgctagatggcaatctggcatcatggtaaaattggcttttatttaacttttttatttttacttttcaatttttaattgtagcaaaatatatattacacaaataagccatcttaagcattttgttactaatatgttaataatatgttacccatagaataagcttattattttaatttttttttatattcttaaaccgtggtaaaatagtacaattgaatattcacctttttacctagagtcaggactcacctaagggcagagatgtgttctgaggattgtgtttttaggtgatattgtcattgtgtgaacatcctagagtgtacttacacaaaccttggtggtagagcctgctgctcctaagctacaagcctgttcaagatgctaccgtgctgaattccatgggggactttaacacaatggtaagcatttgtgtaactgaacatgtctaaacacagaaaagatacagtaaaaatttgctgctaaaatcttatgagaccactgttctgtatataatataatgtcattgaccgaaatgttggtatgtggctcataactgtatgtgtgtgtgtgtatatatatatatatatatatatatatatatatatatatatatatatatatactttttggagacagagtctcgctctatcccccaggctggagtgcagtggtgcgatcttggctcactgcagcctctgcctcctgggttcaagtgattctcatgcctcagcctcccgagtagctgggattacaggcgcgccaccacgcctggctaatttttgtatttttcgtagagatggggtttcgccatgttggccaggctggtctcgaactcctgacctcaggtgatccacctgccttggccacccaaagtgctggcattacagtagtgaggcaccgcactcagcatatatatatatgtgtatatatatgtgtatatatgtgtatatatgtgtgtatatatgtatatatgtgtatatatgtatatatgtgtatatatgtatatatgtatatatgtgtatacatatatgtatatatgtatacatatatgtatatacgtatacatatatgtatatatgtatatacgtatatatgtgtatatatgtatatacgtatatatgtgtatatatgtatatacgtatatatgtgtatatatgtatatacgtatatatgtgtatatatgtatatacgtatatatgtgtatatatgtatatacgtatatatgtgtatatatgtatatacatatatatgtgtgtatatatatatagtttgtttttatttgtttgtttttgagacagagtcttgctcttgtcacccaggctggagtgcagtggtgtgatcttggctcactgcaacctccgcctcccgggttcaagcgattctcctgcctcagcctcccgagtagctggaactacagcataactatatttttaagtgtaaagttcagcaattaagtacatttacttgttgtatcctaatctgtcccatacatcttcagaactcctttagtctgggaaaaccacgactctgtacccattaaggaataactctccacttcccttttccagcccctggcagtcaccattttattttctatttctatgaatttgactcttctaagtacctcgtatacctagaatcatatattatttgtccttttggtgtggatttatttcaattgacagcattcttcaggcttcatccagattgtagcacctgtcaggatttcctttacttttgttcaatttttattttggaatcatgggatacatgtgcaggtttgttgcaaaggcacgctgcctgatgctgaggtttagcatgtgactgaagccatcactcaggtagtaggcatggtgcctgataggtagtttttcaacctgtgtccttcttcctctctcccttggctgtccacagtacctgttgtttccatctttatgtccacgtacgcccaatatttagctcctgcttataagtgagaacatgtggtatttagttttctgttttgaggtaatttgcttaagaaaatggtctccagctgcatccatgttgctgcaaaagacatggtttcattccttttttttttttttgaggtggagtttcgctcttgttgcccaggctgcagtgcaatggcatgatcttggctcactgcaacctccacctcccgggttcaagtgattctcctgcctcagcctcccaagtagctgcgattacaggcgcatgccaccatgccaggctaattttgtatttttagtaagagatggggcttcttcatgttgatcaggctggtcttgaacccctgaccccatgtgatctgcccaccttggcctcccaaagtgctgggattacaggcatgagccaccgtgcctggctggttttattccttttatggctgcatagtattccacagtgtatgtgtgcaacactttctttatccaatccactgttgatgggtacataggttcattccatgtctttgttgttgtgaatagaatggtaatgagcatacaggttcatgtgactgtttagcagaatgattcattttcctttgggcatatacccagcaataggattgctgggttgaatagcagctcaacgcttagttctttgagaaatctccaaactgctctccacagtggctggactaatttacactaatttgcatttccaccagagtatgtaagcgtccccctttctctacagccttgctgatatgttattttttttgactttttaaccaaaacttggttaacgagcaacttgggttgcttccacttttttttttttttttttttttttttttgagatggagtctcgctctgtcgcccaggctggagtgctgtggtgccatctcggctcactgcaagcctgcctcccaggttcatgccattctcctgcctcagcctcccaagtagctgggactacaggcacccgccaccatgcccggctaatttttttgtatttttagtagagacggggtttcaccgtgttagccaggatggtctcgaactcctgacctcatgatccgcccgccttggcctcccaaagtgctgggatgcttccacttttgactctcatgactaatgctgctatgcccatgggtgtacaaatatctctttaattttctgcttccattacttctgggtaatatccagaggtagaaagataattttatttttattcttttcagaactgttgtaattttttttttcacagaatctgcatctcatcacaattgcaccgagagtgcagatgtgccaacttctccaagccctgtgggtggttgttatcttctgtcttatggatagtggccatgaacatgggaatgaagtggttcattatctctttgccaaagaaaaaaatatttctttcacttttcaatagtaattacttaataatgggatgtatttgttggttcctgcacaacttctcaaatgtaggaatcagactagactgtgtcaccctgatgtcctcatcctcattgattttcatgtggttattgtttttttcatagataccactgataacccagcatcacaaagatatgatgactgcaaaaaataaaaataaaaaaatgagagaaccaatgtagaaaacatgaatccctgcagcttatacttaatgacttaatgtggtgacagaagatatgaaatatcaccatacttcccttaaaactaaactgtagggttacctctttagacagatgtggctataaggttataatagcgggaatgcaatgcatgttcatcagatcagggagagaatggagaaggtgacctggttgccgagcaaccctcagtatccttggagatgagtcaccatggaaacagcaataactcttcatttccttttttccagccccgacaaccaccattttattttccattgctatgaatttgactcttctaagtacctcatgtaccaataatcaggtacctaagtacctcatattcctggacagttgtgggggacggcggggaagaagttcctcctcagccaagggagctgtggagactaaggaaagtgattggatgttccacagtttctttcatggacaacctcttgtttactcaaatgatctccacttataatctcctgtatatcatttgtatatctcttagatcactttttcccaaaaatgtagttccaggactccggggggattcaagatttggaatgcacaattccaaataattgtcctaaacacatgaaaagtttatttgcattttccctcattttctctggatgacataatattgcacatgtttgatttaagtggacaatttgatcatagccatctagtggtaaggaaaacattaaagatatttgcagaaatgaaaagcaacaccacctttattgcgaagtttgtttggaaaatgcaagcgtacatttttctgttgtgctttgtttcactgcgcttcacagatactgagtatttttgaatggaaggtttgtgcaagtctgcattggcaagtctgagagtgccattttcctaaagtatgtgctagagagaagtcagtgcctggcttcaaagcttcaaaggacaggccgactctcttcttaggaacgaatgcagctggtaatgttcagttagatccaatgctttttttactattccaaaagtcctaggactctttatttatttatttatttattttgtgaggcagagtcttgctctgttgcccaggctggagtgcagtggcacagtcttgcctcactgcaacctccacctcccgacttcaagtgattttcctgcctcagcctcctgagtagctgggattacaggttgcaccaccatgcccggataagttttgtatttttagtagagacagggttttgccttgttggccgggctggtctcaaactcctgaccgcaagtgattttgctggttttggcctcccaaagtgctgggatcacaggcgtgagccaccatgcgtgggctaaaaattctaggactcttcaggattgtgcaaaacctactctacctgtgctctataaatggaacaaagtcaaaatatcaacatcaataggagtttgaaagaagttgattccaactcctatttgatgactttgtggggttcaagagttcaacggaggaagtcactgcagatgtggtagaaagagcaagaaaactggaattagaattagagcctaaagatctgactggattctgtaatctcataagaaagttttagcagatgagttgaggagttgcttttttttttttttgagagacagagtctcgctctcactctgtcgcccaggctggagtgcagtggcacaatcttgcctcactgcaacctccacctcctgggttcaagcgattctcctgcctcagccttccgagtagctgggactacaggcacgtgtcactatgcctggctatttttttttttttttgtatttttagtagaaacagggtttcactgtgttagccaggatggtctgaatctcctgaccttgtgatccacccgcctcagcctcccaaagtgctgggattacaggaattgcttcttttgaacaagcaaagtaagtggtttcttgagatggaacctactccttgagaagatgctgtgaacattgtagaaatgacaacaaataatttagaatttagattatattctccagttcacaatatccccaccttaatgtaaaatatattattgctaaaaaattataagaatcacctgacccttcaatgagtcataaccatttttctggtggagggtcttgcctcaatgttgatggctgcagactgatcacggtggtggttgttcaaggttgaggtggccgtggcaatttcttaaaatatttcttaaaatatttctctgtagcatgtgatgctgtttggtagcattttacacacagaacttcttttaaaattgaaatccatcctgtcaaaacatgctgctgctttatcaattaattttacattttattttttatcttccagtttacaaaccccagccccaacattcattatgtgggtgatcatgaagaagctacctgtccgttctgatcctcacaatacattgtaaacaatcaataaataatagcttgttttttttgcatttctagtgtaaatatggaatacaattctattgtgatgatacagcaaaaaaagtgttagaaagaagagtcactttctttgtgagtttttccccaaccacagtatccacaattgttaaagcaatttcctcctcaatattgtcataaaagatgtgctagtttttttcttccccatctctcatggtgaaataacagatagtttacctgttttcccctccaggccatgaactctgagaatttgggctgcatttttaaagctgtatcactggcagtttgtactcaaaaagcaggtaaatatttccctggttactccttgattttagaaggaaacacaatacacctaaacctataggatagagcaaaagcagtactaagagagaggcttatagcaaaaaactcatacttagagaagtagagagactttcaaataaatacattaatcatccacctagaaaacctagaaatgcaagaacaaatcaaacctaaaattagtaaagaaaagaaataaggagcagggcagaaataaataaaattgaagccaaaaacaattaccaaagatcaatcagacaaaaagttcatttttggaaaagataaacaaaactgagaaatctttagcagactatgagaaaaagaagggaaaagatccaaataaataaatccgagacaaaaaggagacattaaactgctaccaaagaaatatgaaggattattagtggctattttgaacaactattttctaataaattggaaaatcttgattcttcctatccatgagcatggaatgttcttccatttgtttgtgtcctcttttatttcgttgagcagtggtttgtagttctccttgaagaggtccttcacatcccttgtaagttggattcctaggtatttcattctctttgaagcagttgtgaatgggagttcactcatgatttggttctctgtttgtctgttgttggtgtataagaatgcttgtgatttttgcacattgattttgtatcctgagactttgctgaagttgcttatcagcttaaggagattttgggctgagacggtggggttttctagatatacagtcatgtcatctgcaaacagggacaatttgacttcctcttttcctaattgaataccctttatttctttctcttgcctgattgccctggccagaacttccaacactatgttgaataggagtggtgagagagggcatccctgtcttgtgccagttttcaaagggaatgcttccagtttttgcccattcagtatgatattggctgtgggtttgtcataaataatcttgaaaaaaatgaataaattattgggcacattaaacctaccgagattgaaacatgaagaaataaaccactttaatagaccaataacaaatgactatatagaaacagttaaaaaaaagtgttccatgaaataagagcccaggacatgatggttttactgctaaattctagcaaacatttggatgagaactaacgccaaatctactcaaactcttccaaaatattgaagggaagagaatactttcaaactcattctatgagcacagaattatcctgatactaatgtcagaaaaagatacaacaaaaaaggaaaactatgagccaatattcctgatgaacatagaagcaaaaatcctcaagaaaatggtaggaaactgaattcaacacgtaaaaagatcattcatcatgatcaagtagaattcatcccagggatgccaaagaggtttaacatatgcaaataagtgaacacattagcaaaatcacagacaaaaaccatatcattgttttaatagatgctgaaaaagcatttaatacaactcaatatcccttcatgaaaaaaactgttaaacagggtatgaaaggaatgtgcccccagacagtaaaagccatgtgtgacaaacccactgctaacatcacaataaatggagaaaaataagaaggctttcctttaagatctagtataaaggaatgaggcccaatttcaccacttttattcagcacagttctagaaatcctagccaaagcagttagacaagagaaaaaagtaaagggcatccaaactggaaagaaagaagccaaattgtccttgtttgcagataacataatcttatatttagaaaacctaaatatcccaccaaagaagactgttaaaactgacgaatgaattcaagaaagttgtatgatacaaaatcaaaatgtaatagatagtagatttttatatgccatcagtaaacaatctgaaaaggaaatcaagaaagcaatcccatttgcaatagctacaaaaaattacctagaaataaatttaaataaagaagcgaaagatctctacaatgaaaactataaaacggtgatgaaaaatattaaagaagtcacagaaaaatggaaagatatcccattgtgatgggttgaaagaattaatattgttaaaattttcatactactgcagcaatctacagattcaatgcaatccctatcaaaacaccagtgacattttccacaaaaatagaaaaaaaatcctaaaatttgtatggaaccataaaagaccctgaatactgagcaaagagaacaaagctggagacattacactaccagacttcaaaatatgctgcaaagctatagtaacaaaaacaacatggtactggcattaaaaaacaggtacataggctgggcgcggtcattcacacctgtaatcccagcactttgggaggccaaggctggtgaatcacctgaggtcaggagttcgagaccagcctggccaacatggtgaaaccccatctctactaaaaatatgaaaaaacttagctgggtgtggtggcagatgtctgtaatcccagctactcaggaggctgagggaggagaatcacttgaaccctggaggcggaggttgcagtgagctgagatcacaccgttgcactccagtctgggtgacaagagtgaaactccatctcaaaaaaaaaaaaaaaaaaatcagaaaaaacaaaataaaacaaaaaacatgtaaatatatcaattaaacagagaataaagaaataaatccatgcattttcaaccaacccattttcaataaaggcaccaagaacatacaccagaaaaaggtggtctgttacataaataatgctgggaaaactggatattcttatgcagaaagaaactagacccctatctctgaccacataaaaaattgatcaaaatagattaaagagatagatgtgaaactatgcaactgctagaagaaagcatttgggaagtgcttcaggacattggtctgggcaaatacattttgagttgacctccaaaggacaggcaactaaagcaaaaatgggactacatcaagctaaaaagcttatacacagtagaggaaaaaatagcaaaattaagagaaatctacaaaagagatacctgcactgtcatgtgtattgcagcacaattgagaaaaagccaagttatggaatcaacctatgtgtccaccaatgaatgagtgtgaaaggaaatgtggtaaatatatatatatgtatatgtatgtatacatatatatatataatggaatattactcagccataaaaaagaatgaaatcctgttctatgtggcaaaataaatagaactggaggacgttatgttaagtgaaataaaccaggcacagaaagacaaatatgacatattctgactcatatgtgggggaaataaaattgatctcatggaggtagtgaatagaatgctggttaccagaggctgggaaggatagggggagggagggatgaagagagttcggataatgggctcaaaaatacaatgagataaaatgaataagatctagtgttcaataacacagtagggtaacaaaagttatcaagattatatagggtatttcaaacagctagaagagaaggtttggaatattcccacacaaataaatgaaaaatgtttgaggtgatgaacatcctagttaccctgacttgctcattattcattgtgtgcatgtattaatttatcacatgtatcccataaatattgcaaaaattatgtatcaattaaaaaatcaccaccgtggactaaggcctgtccatggtgctgaagtgcatgtcaggtctgtgaagagacctgatgctacctaatgtaggcaaggctgacctcaaagtatattaatagaataaatggcagccaagctttgtgtattataagtgaaaaaggagaccccaactgggtcatgccctgcccactgccccacataaggactggttatatatttattttatcactcaatcatctcttagcatatgacacatgttagggacaatgctggtaacagagaaaacagaactagtgcatatgtggtcatagcgttccacattcctcacagtctgtgggttttctgaaggtgcaaagctgacaattgctgtttatattttgtttccccaatggtttagagcagtgcctgaacataaaatgtattgattgctaaataaatgggatttctggagatcctggcaaaatcagagcatattgaaggatgaatcagaaaaaaaaagaagtaaggggaaaatatgggagaaaggcagaaaagattggaagaaggagggggagaacatcaaagagaggcagagtccattcacacagaaggagattctaggagagaaacagagaaaggcagacagtctggctccagccaccttggcgtttcaccttccctgtattgaataaagttcaggacctttgcaggtgcagctccctccacaccctgagtcttcatgtggctccatcttgtctccaaccagtgctctgaacagagttcaccacccaagggagccctctctgactgctgtcccccgagcacctgctttgttcccttcttgaggttggtgctttctttattcactttctgtttactgctttctctccattggaatataaattccttagagtatgataaaaaagatggacctaaagttgtgagtttttattggtcctaggtttcttactggaggttagataagtccaaaggacaacaataacaaccacttctcactttcctgtgtatcattattaaaagtattatcttcctgcttctactcttacttgggaaataagaataaaatgataatggggtaagagagttggaggatacaggatagaaatgcagttatgcagtaggaattcatttgaagggagagaatgaaggaggtaattttccaggcactgctcagcatccttggagaggcatcatcatgaaattacagagagaacaggcagtggagaaggagctgtttctccccaaccacatgcatctgcaagagtgaggagtggaacaggcagagccagagaacagcagagttgaggttttccaaggaggtacatgcagcagaatatgcaagagattcgagtgtgtccagaggaatttatcctaacaattgaccatggaaggtgaccagatgggtgtgaaggtcagtgaaaaatggttaaataaagacagtgttggtctccaaagaataacgggatgtagtccttaggtgagaaagaggagtcacttggaaagtaggacgtgatgttggagatgggatgctagaactgaaggcttggagtgattttaggctaatgggagtggatggctatgggcatttggacaatagccatggaggagagagggtccctatatagctagtcaggagtgtcaggagaatcatctccattagggattatctaccctgacattattgaaaatatgatttagatagttatttgtgttgcagggaaggctgcattctgcattgtacattgttgtgtgtggaatatggtctagatagttatttgtgttgcagggagggctgctttgtgcattgtacattgttgtgtgtgaaatatggtctagatagttattggtgttgcagggagggctgctttgtgcattgtgcactgttgtgtgtgaaatatggtctagatagttatttgtgttgcggggagggctgctttgtgcattgtgcattgttgtgtgtgaaatatggtctagatagttatttgtgttttggggggagggctgctttgtgcattgtacattgttgtgtgtggagcagcactctcgcttctacccagaggatgtcagtaattctcctctacttgtgtccagacctcgccaactgtctcttgggggcaaagtcactcctagaataaaaatactaatattatatattagtatttaacattttcagctgttataatcttttaaaaatgtcaacctttgtttcagatacagagggtgcaagtgcaggtttgtgacaggagaatactgcacccagatattgggcatagtacccaataggtagtttttcaccccacaccaccatcccctgtctacgagtccccagtgtctattattcccaagtttatgttcatgtgtgctcagtgtttaactcttgcttataagtgagaacatgcggtatttgattttctattccggcattagtttgcttaggattatggcttctggctccacccatgttgctgcaaaggacatgattttattcttttttatggctgcataatattctatgatgtctatgtaccacattttctttctttctttccttctttcttttctttctttctttctttctttctttctttctttctttctttctttctttctttctttctttctttcctttctttctttcttttctttctttcttttctttctttctctttctttctttctttatctctctctctttctttctttctttctttctctctttctctctctctctctttctctctttcgatggagttttgctcttgttgcccaggctggagtgcaatggcgcaatctcggctcactgcaacctctgcctcccaggttcaagcaattttgcctcagcctcctgagtagctgggattacaggcacacgccaccacacctggctaatttttgtatttttagtagagatggggtttctccttgttggtcaggctggtcttgaactcccgacctcaggtgatccacccgccttggcctcccaaagtgctgggattacaggcatgagccaccacacctggctcacattttctttattgaatccaccattgatgggcacctaagctgattctatgtctttgctattgtgaataacatgacaatgaacatatgagttcatgtgtctttttggtatagtaacccattttcttttgggtatgtacccaataataggattgctgggttgaatggtagctccattttaagttcttttagaaatctcaatactgctttctacagtcactgaactaatttgtattcctctcaacagtgtataagtaagtgttcccttttctccgcagcctcaccagcatctattgttttttgacttttaatagtagacattctgactggtgtgagatggtatctcattgtggttttgatttgaatttctctgatgattaatgataaagagtgttttctcatgtttgttgaacgcttgtgtgtcttcttttaaggagtgtctgttcgtgtcctttgtccattttttcattgggttatttggtttttgcttgttaatttaagtttcttatagattctggatattagacctttgtcagatgcatagtttgcaaatattttctcccattctgtaggttgtttgctctattcagtttccctggctgcacagaagctctttagtctagtagggcccacttgtcacatttcctttttgtttcaagtagttaatatttattttctttcttttcagatagtgtcttgcaatgtcgcccaggctggagtgcagtggtgcccctcctgttgtgaatgtgagtaacaaaccatcttttcaatggcagtctcctgctgacctgtctacctgttgtgtgtgaagctgtgtgattcaaatcagcttgaattacatttttgtgagttctggaaaacccagacaccatctgttcttgtgtgcgagtgtgtgtgtgtgtgtccgtggttgaggaagtttggaagacaccccatggtcaaacaaggtggagtctagggccactttccctgccacatggctatcttattagaaccctgcctaccacaaatgcccaatcccaagggtaaggcaagacagcagccctggaatccctcctttggacggttccaggacccttctccttggatgctcagagatgggatgaagagcaggtaagggaggcgtgggctcagggccagaaagcctggtaacctccccttcctgagtcctgtgtcctcctctgtaaaatgcagacactcctgggatgtcactcacagccagggctgctgggcttattgtactctgcagttaggctcctgtctgaggagatgaaaggatgtgaaatccagcctgtaccatcttcacaagctgtatccatgcctgggctgcaggatttcaaccacagcatagcattgacctgtccaaaagccccaaagcctatcatggccatgtatgcagttattgctacttgggaaaaattcttattaaacagaaaacaagcataggtgaagatacccattttgaaacaatcttattttttatcttttaatttgaggtgatgctcattgtcttataaggggcctttgccatcactagatggcattcttgcatcatggaaaactacacaggagctcctttaaaaatcaattttgaactgtggcaaaatacacatcacataaaatttaccatgttaaaattgtacaaagtacaattttaaaacgaatattgaccatgaccataggtttataattttaaaaattatttatgttttcagttatttttcaactttttattttttaacttgcattttaagtccaagggtacaagtgcaggtttggtatataggtaaactggtgtcatgggggtttgttgtacagatgatttcattacccaggtattaagtctagtacacgttcgttggttttcacaatcctctccctcctcccacccttcaccctccaatgggccccagtgtgtgttgttcccctctgtgttttcatgtgttctcatcatttagctcccacttgtgggaaacaacaggttgtgtttggtttctgttcctgtgttagtttgccaaggataatggcctccagcttcatccatgtccctgcaaaggacatgatctccttctttttttatggctgcatagtattccgtggtgtacatgtaccacattttctttatccagtctatcttttatgggcatttaggttgatttgccttttcgaaatatgctaacaggcatataaggtaactgatcactataattatttttacttgtatagtccactggtgtgaagggcattcacattgttctgccacagtctccacaaactatgtcccatattttgttaatcttgcaatactgaaactctgtgtccattaaaccataactccccatttcccctcccctatcccctggcaacctccattccactttctgttcctgtgaatttgactattctacgtcgaatctattatacttctaatatacaagtgaaatcatacagtttctgtccttttgtgactggcttgtttcacttagtgtaatgtctcaaggttagctcatgttgtagcatgtgtcagaatttcctttctttttaaggctaatagttcgttgtatggacagaccacacttaatgtccctctttattctttgatagataccaggctttgctgccaccttgactattatgagtcatgttgctatgaacttgggcatgcaaatatctcttcaagaccctgcttttttttttttttttttttttttttttttttttttaagacggagtcttgctctgtcacacaggctggagtgcagtggcataatctcggctcactgcaacctccgcctcccgggttcaagcaattctcctgcctcaccctccccagtagctgggactataggcacatgccaccacgtctggctaattttttgtatttcagtagagacagggtttcactatgttgcccaggctggtcaccaactcctgagctcaggcagtccgcccacctcggcctcccaacgtgctgggattacaggcatgagccaccgcgcccggctgaagaccctgcttttaatgctttgggctcatatacccagaaacagagttgctagatcatatgggaattttatttttacttttttcagaaacttttatgtagttttccgtagtggctgccttatatcacaccctaacaacagcacaaaagttttccaatttctccaaaacctgccaatacttcttatgctctgtcttgtggatagtagccatattattgagagtaacgtgatttcttttctctttggaaaaaacatactatttatttcacttttcaatatagcttaataataggagctatgtgcctgttgggcactgcacgacttctcacactttggaatcagcctggaaaatgtcatcctcagttccttgtctttgctgacttttaggtggtacttgctgttcttcacagcgaccactgacaacccagcatcacaaatatgtgatgtgagcaaaaggaaatgtagagggatctaatgtggagactgtgagcctctggagctggtagtttgtgtgatgcatgatgatatagaatattgctgtggttcctttccatcgaaaatatagctattcctctgccgacatttgcagctgtgagaacagaacggcaggaatgcagtaggtgttcattggaggggtcgagtggaggagctcatctggttgccaggcattgctcagtgtccttggagatgagttgccatggaaacagtgaggggcagagaggaggggccgttcctttctagccaagtgagctgcagagacgaaggaaagtgaggcggacgtcccacaatgtcttaaaaatcctctcccattgacacattcagatggcctccatttataatttcatgtatatctgttctgcctgtggtttccaaaaagcagttcaaggcctgctaggggaatcaagaccctttcagtgttccaaactatgtttctaagatcagggaaattgtatttgcttttttccttcccatttcctctgcatgatgtaatattgcaggtgtttgaattaagtagtctatccggccagcagttttttcatggggaaaaaaaaccagaacagaattaaaaaatcagagcatgtggcttagagtaagtgccattcctttaaactttcacttcagttacacagacatttactcacagacacacacacttgcatgtgcactggatcaacatggagaaggtgtgggttcctggggcctgcagtgaccaatttttttttttttttttgagacagagttttgctcttgttgcccaggctggagagcaatggcgtgatcttggctcaccacaacctctgcctcccgggttcaagcaaatctcctgcctcagtctcccgagtagctgggattacaggcatcccagccactatgcctggctaattttgtatttttagtagagacggggtttctccatgttagtcaggctggtctcaaactcctgatcttaggcgatctatctgccttggcctcccaaagtgctgggattacaggcgtgagccaccacgcccggccttgcagtgaccaaagtttcagtggtgctggtgtgagccaagcttccaattttcacagacacggactcaggggtgatgctgcagctgcagtagttgatagctcagggcccataaccaaggggatcttttcctccctgctttttattatggaaattctcaaaaatgcacaaaagtagacagaataatgtatacccactgtgaaagcattcagctatcttctcctttttttccttctagtttaagtaaagtaaatcccagaaataatataattttacctacaaatacctcagtacatatgtctatcagatcataatttaacataatatattaaaggaatttgcaaaaatgtaaaataatgccacctgtattactattttttttgtttggaatatgcagtgtaattattgttcaaaaaagtgtgttatgataatacacaatagatttattgcaaaatttattattttattttattcatctattttgagatggaggcttgctctgtcacccaggctggagtgcattggcgtgatcttacctcactgcaacctccacctcccaggttcaaacgattctcctgcctcagcctcctgagtagctgggattacaggcacccgccaccatgcccagctaatttttgtatttttagtaaagatggggtttcactatgttggtcaggctggtctcgaactcctgacctcaagtgatctgcccgcttcagcctcccaaagtgctgggattacaggcgtgagccaccgtgccacaatttttataattttaaacttaatattttcaaatgtcaatgtataatatggcaaatatacatagatacaaattgtaaccaacaaaattaatcataattccttatttatcatttaatatctagtcctacatttctggggaactttataaccttttctaaaattttaagcaatgcaagtaaattacatcaatgcaaaaatatttaactttgttcaagttgaaatcacgggcacctagtggggcaacctgaggcagaggcagcagacgctgggatccacaactgagttaagaccacaaggcaacttcctcaggctgcaaatcccaacccgagccgacatgaaaatgctcacaactgagaatgatggtttccagcttcatccgtgtccctacaaaggacatacacatgtatacataggtaacaaacctgcacggtgtgcacatgtaccctagaacttaaagtataataaaaaaatacatatataaaataaaaataaaaataagggccgggcgcagtggctcactcctgtaatcccagcactttgggaggccgaggcgggcggatcacgaggtcaggagatcgagaccatcctggctaacacggtgaaaccccgtctctactaaaaatacaaaaaaaaaaaaaaattaggtgggcacagtggtgggcgcctgtagtcccagctacttgggaggctgaggcaggagaatggcgtgaagctgggaggtggggcttgcagtgagccgagatcgcgccactgcattccagcctgggcggccgagcgagactctgtctcaaaataaataaataaataaataaaacttttaaaaaaagcttgaaacctaaaaaaaaaattaaaaaaaaaaatgaagatatgctaacaccacccccccccccccccgccaaaaaatgctcacaactccatttaagcgtacatctgagtttcttacggaagggaattacatctcgaggggatagtggcacaatgcgggggactgggtctatttcgtaggtaggagccttattctccaaactccaaatcaggacttgcaggctgaaaactaccgtttactctgcagacatcagggcaggagagcagcccccagctgatcacctctacaccccaggcccccacctctgtcggccagtggacttctctgtcaatgtgctcattgcttcaggtgaaaccagcactgattcatgtccccgtcagctcctcaaggccctcagctcttcctcaatggaaaccaaaaactatgtgagtctggtctcaatcacttgagaagtttattggccgggcctggtggctcacgcctgtaatcccagcactttgggaggccgaggcgggtggatcacctgaggtcaggagttcaaggccagcctggccaggatacacactgccacattactacaatgctattgttctggctgagaaaacaatactccagaagcaacctcagacacaaacgtttttccttgaccatctcctatcctcctgtcattcagccccattcttcccttgggctagccatagaaactagaatccctcctttaaggtgggcgatagaaaccagaatgccttttccccaaagccagttataaaatccaaaaatattactttaattttccatccatccttctgttgaaaaactggccataaagaaacctggctgggcgccggtggctcatgcctgtaatctcaggattttgggaggccgaggcaggcagatcacttgaggccagcagtttgagaccaacctggtcaacatggtgaaaccccgtctctactaaaaatacaaaaattagccaggtgtggtggctcatgcctgtaaccccaactactcaggaggctgacacacgagaatcccttgagcctgggagacagaggttacagcaaatgctgagattgcgccactgtactccagcccaggagacagagcaagactcagtctcaaaaaaaataaaaataaaaaaataaaaataaaaaaaatgtctgatctaccttgtccgactgtaggttacaagaccctcattccagagagtgtccctgcacaaagaggccaaggagaatctaagcagacaaacctcatgggtttccccactcagtccactagcattaaaccagacccttagcatccagtatttctacgtggctctccacactttgtagaacctaagcataaaaatgggcaatttctcccgtatctttgggtgttcattcttaaagttcccatgcgtacatttgtttttttttttttttttttgaggcagggtctcgctctgttgcccaggctggagtgcagtggtgtgatctcagctcactgcaaactccacttcccgggttcaagagattctcctgcctcagcctcccaagtagctgggattacaggtgcacaccaccacacccatctaagttttgtatttttagtagagatggggttttagcatgttggccaggctggtctcaaactcctgacctcaggtgatctgcccaccttggcctcccaaagtgctgggattacaaggttgagccactgcgcccggcctccatatgtacgtgttaagtaagcttgttataccttttctcctattaaccaatctgctttatgtcactgattttcagtgaaccatcaggaggccaagggccttggcccctacaccatcccattgttcctatggctttgaattctcatgggaaatgtaatccaggcctgtctgattccttgatttgccaggctgcctaccctgattaacccagcgaaggaatttcaatggcaagtgtgcttggactccagtgacccgggcttgtcgagatcgcctctagcataggatcagtttagaattctcagaagagaaggtaacatgtagattcccaagattacaaatcctaactttcattatgtgggtgatcatgggctagacacctcccttttctgagcctcattttcttttttttcttttttctttgtttgttgttgatgttgttttgaggcagggtttcactctgtcacccaggctagactgtagtggtgtgatcatggctcactgcagtcttgacctcctgggctcaggtggtcctcccacctcagcctcctgagtagctgggactacaggtgagtgccaccatgccgagctaatttttgtattttcttgtagatagggggttttgctatgttgctcaggctggtcttgaactcctgggcccaagtgatctacccacctcagccttgcaaagggctgggattacaagtgtgagccaatgcgcccagaccctctgagcctcatttgtttttacctgtcaatgagtgatagacatgggtaaaattttgacacaatgcccaatacattgtaagcaattaataaatattagttgggtgtttttgtatttctaacataatataaaatacaattttaatttagtaatatgagccaatgagtgttagaaatggtaattaccttctttgtgatgttttctccatccgctgctttcacaattgttacaagctccacctcaacactgtcataataatagtgctagtaggccgggtgtggttggtcacgcctgtaatcccagcactttgggaggccaaggcgggtggatcacaaggtcaggagttcgagaccagcctggccaatatggtgaaaccccgtctgttctaaaaaaatatagaaattagccgggcgtggtggcaggcgtctgtagtcccagctactaaggaggctgaggcaggagaatcgcttgaacccgggaggtggaggttgcagtgagccgagattgtgccaccgcactccagcctgggtaacagaacgagactctgtctcataataataataataataataataatagtgctagtactcttgtccacatctctcatggtgatgtaactgactgcctgtttcccacaccactccatcagaatttgggctgtgtccctaaaacctgtattaccagcattttgcacttgtaaaccaggtaaatagttccctggttaagcacctgatttaaaaatcagcacagcccagccattgaccacgacctgtccatggttctgaaaggcacgtcgagtctatggactcaccaactggcaacggagattgttgatgctaacttgtgcaaaggtgacctcaaagtatatttctgtagggtccagccccacagggtcggtgggtctctccccatgtgtggagacgagagagtgtagaaataaagacacaagacaaagagataaaagaaaaggcagctgggccagggggaccactaccaccaagtcgtggagactggtagaggccctgaatgccaggctgcactgatagttattggatacaagacaaaggggcaggataaggagagtgagccatctccaatgataggtaaggccacgtgggtcacgtgtccactggacagggggcccttccctgcctggcagccaaggcagagaaagagaggagacaaagagaaagacagcttgcgccattatttctgcatatcagagacttttagtactttcactaatttactactgctatctagaaggcacagccaggtgtacaggatggaacatgaaggcggactaggagcgtgaccactgaagcacagcatcacagggagacggtcaggcctccggataactgtgggcgagcctgactgatgtcaggccctccacaagaggtggaggagcagagtcttctctaaactcccccggggaaagggagactccctttcccggtctgctaagtagcgggtgttttcctttgacacttacgctaccgctagaccacggtccgcctggcaacgggcgggcgtcttcccagacactggcattaccactagaccaaggagccctctggtggccctgtctgggcataacagaaggctcgcactcttgtcttctggtcacttcccactatgtcccctcagctcctatctctgtatggcctggtttttcctaggttatgataatagagcgaggattattataatattggaataaagagtaattgctacaaactgatgattaatgacattcatatataatcatatctaagatctatatctggtataactattcttgttttatattttattatactggaacggctggtgtccttggtctcttgcctcggcacctgggtggcttgccacccacgtatttcaggaataaataaaagccaaattttgttgtgttgtaaccaagaagagaaagccccaatttggtcatgtcctgcccacagccccacataaagatgagttaggtgtgtgtttctcacatcaacagccccttagcatgtgccatgtgttatggatactgctgggatggaggaaagatggcagaaatagtgcatatataatcctgcattcaaaactcctcacagtctgtgtgatagaaagaatgaatggcagggcgctgtagctcatgcctgtaatcccagcactttgggaggctgaggtgggggatcacttgaggtcaggagttcgagaccaacctggccaacatggtgaaaccccgtctctactaaaaatacaaaaattagccgggcttggtggtgggtgcctgtagtcccagctattcaggaggctgaggcaggagaatcgcttgaatccgagaggtgcaggttgcagtgaaccgagatggcgccactgcaatccagcctgggtgacagagcaagactctgtctcaaaagaaagaaaagaagagaaaaggaaaagaagaggaagaaaacaaaagaaaagaaaggaaagaaaaggaaaggaaagaaaaagaaaggaaagaaaagaaaaggaaagaaaaggaaggaaagaaaaggaaaggaaagaaaataacccaaaataatgggcttctgaggttccaggttgttaatggggattgaataggtccaaaaaacccaccaaaacaactatatcttctttcctgttgaacatttaaaaatattcttttaacatttctacttttgtatgggaaatagaaatctgatgacaatggggagagagtgttggaggcttcaggatagaaagcctgcagtggactatgtattcattggagaagagaatggaggagctggcctggttgccaagcaacgctcggtgcccctgagattggagatgactcaccaggaaattagagtgagcgcaggcagtgagggagaggctgttgtgccccatcaagagcagcttcaggacaaagaaaagtcatgtgaatgtcctgcagtttctctaaaaaaatagcctgtttgttgtacattcagatgatctccatttataactttatgtccattacttttatatatcttagcccactagttccaaaaatgtagtttaaaaacttctggtggggcgggggcgggaatcaacttccttttaaagggtccagaattccaaactattgtgctaagaacgttaagattttattttcctatttccatctcattttcttcatgatgtagtattgtgagtatttgacttactgaatttgagaatctgtcttgtattaaagggttttattgcaaaaatatgaagcaatgctacctatattactgtgttttgtttggaaaatataatcgttgttcataaaaaacatgtttgttaacaaataataggtttgttacattttagagttttaagtttagaattttctgagctccaatttataatatggtaactgggtaaaaaatacaaattatgcaaataaaaattatctgaggatccccagttactttgaaaaatataaaagtggactgagatttaaaagtttcataattgctctcttaggttaagtacctaggtatcatctgattgggtggagtaaagcacacctttaatgtttttgacacgtgaattctcgttgctgaagtgatagacagctgttcctctagctccaaattctcacgggaaatgtaatctaggtctgtctgactttaattaatttgtcaagttataaaatcaacctaagtgaccatcaacagatgaaaaacgtggtatatatatatgtgtgtatatatatatatatatatatatatatatatatatatacatacaatggtttattattcagccatgaaaagagtgaaatcttgtcatttgcagcagtgtggatggaactggaggacattatgttaagtgaaatgagccaggcacaggaaggcaaatatcgcatcttctcactcatacatgggcgctgaaaaagtagatctaatggaggtagaaagtagagtgatggtttccagagactgagaagcagggaagattgggcaatgggtaaaaatggttaaacagaaggaataatgtctagtgtttcatagcacagtagggtggctatagttccgaagtatttatagtatatttcaaaatacctagaagagaagatgtggaatgttcccaagaaaaataaatgagaaatgtttgggtgatggatagcctactcaccctgatttgatcgttacacattgtatgaatgtatcaaagtatcacatgtaccctatcaatatgtacaactattatgtgtcaatttaaaaaatcagtgcagtcccatcaccgataagacctgtccatggtgctaaaaggcaccttgagtcttgaactgatggcatatgccaagtgtttggaaccatactggatacagaggaatgaatgcctgtatgatccatgcatttaaacttttttacaatacatgagtattctgaaggtactaagctggctgttacaaggttcatattcttatttttccaatggtctagagaattacctgtacataacgtgctgattgctaattaaataggattctggagaccccaacaatattagactatgttgaaggaaggataaaacaaaaataagaaagagaggggaaaatagggagggagtaaaatggaagaaggatgaagataacatcaaagagacagagcagagtccatgcagacagaaggttttctaggagagaaatagggagaggtaaacagtttggctccagccacgtgggccactctcttttcttggaatgaatcatcctcaggacctttgcacatgcagttccttccatggctctgggtcttcatgtggctccttcctgtctccattcaggattctgagcagagttcaccacccaggggagtcctcactgattgccaccccgaagtacttgctttggttccattatgaggctgacacttcctttttaaaaaaaatacagtctcactctgtcacccaggctggagtgcagtggcacgatcatagctcactgcagcctcgaattcctgggctcaagcaatcctcctaagtaactgagaccacaggtgcacaccaccacacccagctgattttttctttaagacagagtctactcactctgatgcccaggctggagtgcaatgccacaatctcagctcactgcaacctctgcctcctgggttcaagtgattctcttgcttcagcctcccaagtagctgggattagaggcatgtgccatgaggcttggctaatttttgtattcttagtagagatggggttttgatatattgatcaaactgctctcgaactcctggccccaaatgatctgccttcctcggcctcccaaagtgctgggaattacaggcatgagccattgcactaagccccagctgattttttctatttttagagatggggttttgctatgttgcccaggctggtctcaaactcccgacctcaagcaatcctcctgtctcagcctcccaaagcatggggattacaggcataagccactgcacctaaactgatgcttcttttccttgcttactgtttgtgctcttccttgcctggaatgtaagctcagagtgtggtagaaaaatatacctaaagttgcaagtatctcaggttttaggtttgttactggagatagaagaggttcaaagggcaaaagtaagaattgtatctcatttccttttggacatcattaaaaatattatcttaatcttgttacttttgtttgggaaataggaataaggtggcaatgggaatgaaagagttgaagtcttaagatcagaaaagtctgccgggggcagtggctcacgcctgtaatctcagcactttgggaggctgaggcaggcagatcacttgaagtcagaagttcgagaccagcctggccaacacggtgaaaccctgcctccactaaaaatacaaaaaaattagccaggtgtggtggcgcgcacctgtaatcccagctactctggaggctgaggcaggagaatcccttgaacctggaaggtggaggctgcagtgagctgagatggtgccattgtactccagcctgtgtgacaagagtgaaaaactctgtaaaaaaaaaaagccattatgcagtggtcatgcattgaagtagtggtgtgcatagaggagctggtcctgcttccaggctgtgctcagaatccttggaggtgagtcaccatgaagtgagggtgagaacagcaacggggtagcagctgttcctttctagccaccaggagtgaggagtaagggggagggcaagggtagtcagagcccaacagggatggggttttccaagagaatcacatgaaacagactatgaaagtggagtgtgtgcagaaagaatccatttcacagattgaccctagaaggtgacttggatgtgggagtgaagttttgataaaaatggtggaatcaatggagcattggtccttaaaggataaaagaatgttggtatcaggagaggaggataagtcatctgttaggtaggatgtgatgttggagatgggaatgggatgctggaaatgaggggaatgaatgatcttggttattgataagtcatctgttaggtaggatgtgatgttggagatgggaatgggatgctggaaatgaggggattgagtgatcttggttattgataagtcatctgttaggcaggatgtgatgttggagatgggaatgagatactggaaatgaggggattgagtgatcttggttattgataaatcatctgttaggtaggatgtgatgttagagatgggaatgggatgctggaaatgaggggattgagcgatcttggttattgataatgacaaggcaggtaggagcgggtggcttagggagattgaacaaaagccttggaggagaggaggtcaatatggtgatggtcaaacatgttgggaggatcatctgtatcatgtattctcttccagggtaacactgaaaatttggtaggatattctttgttgtggcagggagggttgtgctaggcagtgtgggttgctcaggggcattcctggattctcagcagctctccactcctgtgatgactaaaaactccttcagacactgccaactatctcctaggggcacgagggctagcccaagcctgagggtggaacaacacagaagccctggaaaccctgctctaggaggtgccagacccctctccttggatgtcccgagacaggctggaggagcaggtgatgggggtgtgggctcaggaacaggcagcctggagacctcccatctctgagcccagtgctttctgtaaaacatggacactcctaggaacttgctcacagccaaggctgctggggatggttgtgtgtattttcccctgcagttagattcctgtccatagagctgaccagaatttgaaatccagcctgcactctctctacagttatgcccacaccctagctgaagaatctcaccagagccataccactgaaactgtctttgcaaaaattacaacagcaaaaattatgacagtgaaagagatctgatctaaccgatccccatcttgcctttaacctccaaagtgcctagatcagtgctgagtttaggccaagttaatctggggagaggttttaattcataatttaagtgatagtagcccttccccccaaaaaccaaaactgcctttgtaaagctaaagaaaggccaccaggttaggaggatgagcctgaattctgctcaggtgtagacttaaatggtaaccaggagtctggaggtcataagatttgccacttccacaattacctctgcagataacatcgctcttgtagaacctaagattggccttttgaaatgtcttttcaggtttttgcatttccgatggccagtggctccattcgaatctgtcaacccaccaactggtcctttagccccacccagaagtggagtccctggcccaccaaactagccttgaaaaaccctaacctttgaattttcaagaagattgatttgagtaataactgtctcccacgctgcgtggccagcctcatatcaataaactctttgttgtagtgtcatggcctcagtgaattgttttttgcttgtttgttttgttttttcgttttcatttttgtttttgagatggagtcttgctttgtcgccgaggctgaagtgcaatggtgcgattgcggctcactgcaacctccgcctcctgggttcaagcgattctcctgcctcagcctcttgagtagatgggattagaggcacccaccaccatgcctggctaagtttgtatttttagtagagatggggtttcaccacattggtcacctgctctcaaactcctgacctcaggtgatccgcctgcctcagcctcccaaagcgctgggattacaggcatgagccaccgtggctggtgtctcggtgaattgcttttttctgtgcagtcagcaggaagaaccagcccatcaggaggttacaccattgcagatcaatccaaagtcctacagccttccgcggccacgtgctcattaataaaatttggggcacaaattcttttcaaagaacaaacaagaaagtgacacagcaatttttagggtctcatttttttatctttcttctcatttgatgcaatgcgtatgattttatcaaatgctatcaagcccatttgccacagctagatggcactgtggaagcattcgaaagtaaataggcattcctagttaaaaatctggcaaactacacaggatataaaatttaccatatactccatattttgctaatattaattcataagcaaagactttcaagtttgttttaaatttttgaataaaaatgggttaaattattacataattcaatatttatattttaatcatttttaagtgtgtaattcagtgtcattaattgcattcacattattcacaaacatcaccaccttccatacccagagtagttttcatattgcaaaaccggaattctgtactcacgaaacactaactctccgttccttctctcttcgcccctgggaaccgccattgtactttctgtttttataaattagactagcttgggtaccttatggaagtggaatcatagagagttgtcgctttgggactggcttattccccttggcatcgtgctctaaagttcttccgtgtcgtagcatgtgccagggttttatttctttgtaaggctcagtaatattccatcgcatgcaaaaaccacagtttttttttttgacagagtcctgctcttgtcgcccaggcacgacctcagtgtggcatgatcattcagtggcacattctcagctcactgcaacctcgagatcgctcagtggcacgaactcggctcactgcagcctccgcctcccgggttcaaacgattctcctgcctcatcctcccgagtagctgggattacaggcgcccgccatcatgcccggctaatttttgtatttttagtagagacggggtttcaccgtgttggccaggctggtctcgaactcctgacctcaggtgatccacccccatcagcctcccgaagtgaaaaaccacagtttgtttacccattatccactcctcccttgatggacacttcagtttctctacttttgactattatgaataaagctgctataaacacgagagtacaaatatctctttaaaacactgttttcaatttttgggggtatatacccagatgaggacacaggtggatcatctggtaactttattaagaatttaacggaaaccatctcacttccaaagcccctgtaccacatcacattcccaacaacagggcggaaggcttcttatttttccatagcctgccaacacttgttatattctgttttatggataatagccatgttaataatgtgtggtggttccttctttctcttaaaatctattttttcgatttttcaacaatgacaattattgaataatgggatatgtgtgtctgctgggcaccgtgcaatttctcgaactttcgaatcagatggggccatgccaccctcactcctcattctcactgattttcactgggggattgcttttcttcacagcaagcactgacacctcagcttcacagagacattgtgtcagcccaggaaatgtagagagaccaaatgcagaatctgtgaaccattggagctggtagtttccgtggcctcggatgcggaatgttgctgttctcccctcaattttaatgtatccagggatcctctgcagacaattgcaggtatgaagatagaagagcaggaaggcagtaggtcttcattgcagggggagagaatggaggagctggtctggttgccaagcaatgctcagtgtctttggacatgagtcaccatggaaactgagtgacaactggcagtgggggaggggctgttctgccccagccaaatgcagctgcacagaatttaaaaagtgatgtggatatttcacagtttcttgaatcaataacgtctcatttgtacactctgatggtctccatttgtaatttcttgttcattattggtgtatctcttaggccagtaatttccaaatgtagtaaatcaagatctttgtaagggttccacaacttcaaactatttttctaaaaacattaattttattttattttattgatttttttgagacaaggtcttactctgttgcccaggcaggaatgcagtggtgccatcacagcttactgcaaccgcgatctcctaggctcaagtgatcctcccacttcagcttcctgagtagctgggactataggcacacacctccatgcccacctggtttttaattttttaatttttagtattttttatttttagtagaggtcttgctacattgcccaggctggtctcgaactcctgagctcaagcgatctgccctccttggcctcccaaagtgctgggattacaggtgtgagccactatgcccaaccagaacattaatattttatttggcttttttccttctcattttctctgcatgatataatttatgagtagattgaggaaatctatctctcttctatttaggaggaaattaaagggatttgcaaaaatgtaaaacaataccacctttacctttactaagattttatttgaaaaatattaatgttgttcataaaatgtgggttcttttaacatataatagatttgttgctgtttttaagtttaaaattgaacaatttctcttcttttatttataacatgactaatataggatatataaactgtagaaagaaacattcttcggggatttctcaataatatttaagagtattgggattctgtcgatgacacaaatggagggaaaatcattccatgctcaaggattggaagaatcaatatcattaaaatggctatacaacacaaagtaaactacagattcaacgttattcctatcaaatgaccaatgtaattcttcacataattggaaaaaacaatctgaagcagcaagaacaaagttggaggtatcacattacccaacttcaaactgtaagactacagtcgccaaaacagcagggtactggtacaaaaacacacgtagaccaatgaaacagagcagagaacccagaaataaagctactcacctacagccgtctaatctttgacaaagttgacaaaaaaaaaaaagcaatccaaaaggactctctattcaataaattgtgctgggatcactggctagccatatgcagaagaataaaactggacccctacatttcaccatatacaaaaattaactcaaggtggaataaagatttaaacgtaacacctcaagctatacaaatcctagaagaaaatctagaaaacaccattctgaacttgggccttgggaaataatttatgactaaattctcaaaagctattgcaacaaaaacaaaaattgacaagtgggacctaattaaactaaagagcttctgcgcaagaaaaaaactttcaacagagtaaacaggcaacctacagaatgggagaaaatattcacaaactgcatctgaaaaaggtctaatgtcaaaaaatctgtaaggaacttaaacaactaaacaaggaaaaaccaaataaccccattaaaaattggcaaaagatatgaacagacgcttctgaaaagatgatatataagcagccaacaaatatatgaaaaaatgtttataatcgctaatcatcagagtaatgcaagtcaaaaccacaatgagacatcatctcacacgaataagaatggctattaataaaaagtcaaaaaacagtaatcgctggtgatgctgtggagaaatggaaacacttacacactgttggcaggaatgtcaattagttcagtcactgtggagagcagtttagagatttctcaaagaacttcgaacagaactaccatttgacccagcaatcccattactgagtatatacccgggcatggtggctcacacctataatcccagcactgtggaaggctaaggctagtggatcacctgaagtcaggagctcaagaccagcctggccaacatggtgaaacaccgcctctactaaaaatacaaaaattatccaggtgtggcggcgggtgcctgtaatcccagctactcgggaggctgaggctggagaatcacttgaacccaggaggcagaggttgcagtggagattgcgccactgcactccagactgggcaagaagaatgaaactctgtctcaaaaagaaaaaggaaattgagaatacaatgactaaaatttgaaatagataatgtaaccaacttttccgttatgtttggggtcattgctatggcaacaataaaagggttccctatttcccatcagtcttaagcaagatctagtggcaacctaactgatactgctggcacttaaaaagcaaagactaggcgtggtggtgtatgcctgtaatcccagcactttgggaggctgaggtgggaggatcacttgagctcaggagtttgagaccagcctgagcaatatagcgagactagatccctacaaaagttttaaaagttcactgtgcgtggtggcaaggatctgtgattccagctcccactcaggaagctgagatgggaggatcccattagcccaggaggtcaagactgcagggagtcatgatcacaccactgcattccagccttaatgacagagtgagatcctgtctcaaaaacaaacaaacaaaagccaaaacagcatggtaaaaatattttcatagaagaaaacagtcggccaggcgcggtggctcacgcctgtaatcccagcactttcgaggtgggcggacaacaaggtcaggagatcgtgaccagcctggccaacatggtgaaaccccatctctactaaaaatacaaaaattagccgggcgtggtggtgcacacctgtagctccagctacttgggaggctgaggcagaataatcgcttgaacccagaaggcagaggttgcagtgagccgagattgcaccactgcactccagcctgggtgacagagtgagattctgtcaaaaaaaaaaaaaaaaagaaaagaaaagaaagtcgaaattatttgaggtgtataattgttttcttagccagtatgcatgttttaaatttaggacaatttatcattaactatagaaattataaaggtaattaaacccatattactcatgttctgaaccaagaaagcagcatatttggcattctaaatacttacaaaacataaaagactgctagagcaacaagtcagccttgtaattaaatatgaaaaatcaacttttggttgttgataagttgtatctcatgcttactttctgtttcactgatttctacttttaactttattatttccttccattcttcccctttctttcctttttttgagacagggtctcgctctgttactcaggctagaatgcagtggtgcaatctcggctcactgcagcctctgcctcctgggctcaagcgatcctcccacctcagtctcctgagtagctgggactacaggtgcatgccaccatgcctggctactttttgtagagatggggtctcactatgttgcccacgctggtctcggacttctgagctcaactgaaccacccacctcagcctcccaaagagctgggattacgggtgtgagctattgcgcctggccttccttccttcttgtttctttagactcaattttgtttatttttcacctttttgaaatggatgattaaataatcaattttcagcttttcttgttttctattataggtatttaaggctgtacatttctatctaagcacagctttatataagtatcataagttttgataaataatgttttcattattttgcagtccagatttttaaaatttttattttttgactgatgcattatttagaaatatattgcttaattttctaatatatggatgtttttgagttttctttttgtttttgtttgtagttaatttataccatgatcagaaaccatactccgattcagttctttgaaatttgttgagaattgctttgtgttctgtatttggttaattcatgggtactttatatgattgtctcttctagttattgggtgcagtgttttatgtacaccagttgggccaggtttgtaatcacgatgtttaaatattcttgtttaaaaattcacaatgtttaaaaattcttgtttcttgtttatttcgtttttcagttactgagggaattacgttaaactctcctactaagaatatgaattcatttatttctatttccaaaaagagcatgagtgttctaaaataaaaggtttgaggattactctcctagaataaatttctagatacagtttcactgaatagaaggaaatacaccatttgtggtttctgatacatgatgtcaaattgtgacaatgcttttcagtagtgttcctgggccccgaattctcatggggaatgtaatccagcctgtatgacttttcccaatttgccagcctgcctcccataatagacccagtgatggaatgtctatgagaagcatgcttgggctcctgttacctggacttcaaaagatatcttctaatataaaaacttttagagttgtcaaaagagatggtagattgcatatacctgggtttaccaaccacggccccaacattcattacatggatgattatgagccagacacgtgccctttctgagccttgcttcttgcacctggaaatacaggatgaggttggtaagaacttgacaaaatacattctaggtgcttaaaaaatcattgctgggatttgtttttttgtattttcacaataaatatgaaaacagttttaatttaatgattatgaacaaaaaaggatgaaaaccaatagtcagtttctttgtaaaattttccccagccagtctatcatcaagtgtttaaataattccctccttacaactgttggagtaggtgtcacatctcttgatttccataacttctggtgctgtaactggctgtttgctgttttccctatcaggccataaacttcttgagagtttgtactgtgtcttgacaacctgtttcactagtgctttgcatccaagaagcaggtgaatatttttctggtgaagcccttgattaatcagtacagccccaccattggctgagatctgtccgtggtcctgaaggtcacacttgagactattaactcattcacaggaaagggaggcagctgattctagctgacttgtgcaaaggtgatctccacatacattcgtggaataaagtgaggacaagctttattgtttagtgaaaagggaaggccacaaatgagttcatggcatgtccacaatcccacataaagtctggttttatgtttattccatcactcaacagtcacttagcaaatgctgtgttagggaaagtgtgggggcggggtggaggcagaggaaaaaaaacagaaataatgcatatgtgattcctgcattcaaaatttctcacagtctgttggtattctgaaagtactaacctgactattacatgttcatattctttttgttttttgagacagagtctcactctgtcacccaagctggagtgcagtggcacaatttcggttaactgcaacctccacctcccaggttcaagtgattctcctgcctcagcctcctgagtagctgagattacaggcacgcaccaccatgcccagctaatctttgtatttttagtagagacggggtttcaccatgttagccaggctggtcttgaacacctgacctctagtgatccacctgcctcagcctcccaaagtgctgggattacaggcgtgagccaccgcgcccggccttgttcatattcttgtttctccaattgtctgtagcaatgcctgtacgtaaaatgtgttgactgctaagtaattgtgctatcaggagaccctgaagaaataagactatattgaagaatagataagaagaaatagaaaaatataagagaaagagaaaatatagggaggttgtaatatgagagaaaggatgagaaagtgaaagagaggaagaagagcatattcagatagaaggaaattctaggagagaaatagaggtgaattatttctctctaggagagaaatagaggtgacatgagcctctgtgtgggccttgaatgagccacccccaggacctttgcacgtgctgttcccactgccacccgggtcttcacaagattcctcctgtcttcacacagggctctgatcagaggtcacctctcatggaagcggtccctgactgctgtccccaaaagcccttcaagcacctcctgcattccactcatcatgaggctgacttttatttctccctgtttctgcctgtacttacagtggaatataaactcaatgaacaatggtagaaataagaaactcctgttttgagattcttctggtgccaggagattgttactggagatggaaaaggcccgaaggacaaaaataaaactatacctgatttcctgttaatcatcattcaaaatgttcacttcctggtgtggcgtatgtgaaggaacgaggaataaaatgccaacgggcaaaggagagttggaggtctgagcatagaaaagcaggagatcagtgggtattcctggcagggagagtgaacagaggggctggtcttgtttccaggcagtgctcagcgtccttggagaggggccaccgtgaagttagggtgagagcaggcaggatgagggcaaggctgttcctccccagccacctgcagctggaggactgagggatggagaaggtagtgtcagagctccgcggggatggagctttccaagggaaccacatgaagcagaatataaaaagagattcaattgtgtgcataaagtactgattctactgattgaccatgaaaggtgacctagaggtaaggtcaagatcagtggaagatggttgtatgaatggcgtgttggtccccaagagatgaatggatgttggcatcagatgggaagggggggtcccccggaaggcaggacgtgatgctccagatgggatgcttgaacggaggggatggtgtgatactctttttgtttgtttgtttgtttgttttgttttgaaagtctaagtttattatgggtcaacttgattcttttttattattattatactttaagttttaggatacatatgcacaacatgcaggtttgttacatatgtatacatgtgccatgttggtgtgctgcacccattaactcgtcatttagcattaagtatatctcctaatgctatccctcccccctccccccaccccacaacagtccctagtgtgtgatgttccccttcctgtgtccatgtgttctcattgttcaattcccacctatgagtgagaacatgtggtgtttggttttttgtccatgcgatagtttgctgagaatgatggtttccagcttcatccatgtccctacaaaggacatgaactcatcattttttatggctgcatagtattccatggtataaatgtgccacattttcttaatcagtctatcattgtttattggtaatgacaaggttgatgggaagtggaaggttaaggaagtttggacaggaaatttgggagagaggaaatcaatgtggagatagtgaaaagtggtgggaggatcacctgtgttagtgttcttccacctcagcatcatagaaaatttgggctggaatgttcttttatgcaggatggaggaggccgtcctgattttctagggtgtttgtcagcatccctgcctgctacccaggggatgtcaatagttctcttcagttgtgaccccaaatgtttatccaaacttgccaaatgtctcctatgggcaaaatacccctggttgggaaccacagattacaatacacataacattcacctgtaaattagcgggaagtaatattggtgaggatgacagttcacacccacagaggactaagatcacaaagagtaagggtttcgtgaggatctatgcaccaaccctgtctgtcattttctgtaattctgatccatgacatctgggaccttgctgactccacagggatgatcttgccaggtcttgcctattccgaaagacagcagtcagtttccttgagagggagcctttcacgtggaaatgaatccagagcccacaccccaaccagcttctatggagctgtcacactcagggccactgtgacctgccctgtcacccagggccataaccatggacagccatgggctctgcccagagccactgaaattattccaggtagtcaatcctgagcctgctcgttttgtctcccttgttttttccttcagaaaccataaggaaggctctttgcccacatgctcccccatgagcttctgcctcttgacagacactggggcttcccctgcggcccctcttggcctggtgtgccccctcctcttgtgaatgtcacaagctatttttgttttagtgacagtcatttcctactctttttttattttgttttgagatggagggagtctcgctctgtcgcccaggctggagtgcaatggcgcgatctcggctcgcaacctccgcctcctgagttcgaacaattctccttcctcagcctcccaaggagctgatattacaggcgccagccaccacactagctaatttttttgtatttttagtagagatagggtttcatcatgttggccaggctagtcttgaattcctgacctcaagcgatgtgcccgcctcagcctcccaaagtgcttggattacaggcgtgagtcactgcacctggccctcctgttctctttaattgttttgtgtgaaactttgtgatgcagggaattgcttcccgcaagaattcctaaattccattttgtgagagtccttcaaaacccagaggcattttctcatactacgtgtgtgtgtatgtgtgtgtgtgtgtgtgattgaaggggaattgggagatgactcttgagtctcaggtcatttacttgccccatatttaccttattgggaccctccctaaacccaaacacctaatctcaaggctacagcaaggcagcagccctgaaatctctcctctgggaggtaccagcacccggctgcttggatgctcagaggcaggatgggagcaggtgacgggggtgtgggcttgggaccagacagcctggagacctcccctctgtgagcccaccatcctcctttgtaaaatgcagacactcctaggacctcgctcacagccagggctgctggggatggctgtttatgttgtaccctgcactagggtcctgtccaaggcaaggggaaaaatgtgaaacccagcctgctctccgcagctgtgtccatgcagagctgagggattattttcaggcatcccactgatctatcccacttcccacagcccaccctgtacataggcacagccagtgtaatttgggaaaaactcattttaaacaaacaaaaaaatgtcccagccaatacaacatacccctttaaaaagtacattattgtgtttttcttttcatttgaagcaatgtctatgacattgcaacgtatatataacttaatatttaacattttaaccatatttaattgtacagttcccatattaggtgcattcacattgttttactatgatctccgttgttcatctccaatattcttttcatcttgaaaaactgaaactctgtacccacaaacaactccctacttctccctcacacctgtccctaacatccactttctttcttctttctttctctctctctccctttcttccttctttccttccttccttccttccttccttccttcctttctttccttctttcttttttttctgagatggagtctggctctgtcgcctaggctggagtgcagtgacacgatctctgctcactgcaacctccgcctcctgggttcaagtgattctctgcctcaacctcccgcgtagctgggattaaggctcccaccaccatgctcaactaatttttgtattttttttagtagagacaggatttcaccatgttgaccaggctggtctcaaactcctgacctcaggagatccacccgcttcggcctcccaaagtgctgggattacaggcatgagccactgcgcccagcccactttctactttctgctctattagttggacagcattagagacactaaattattggagtcatagggtacgtcttcttttgtgcctggcttgtttcactgagcataatgtctcagggttcatacagactgtagcatgtggcaggatttccttccttcgtaaggatgaataatatcccatggtattgatagaggatattgtgtttattcattcatactttgatggacctttgggttgcttctacttcttgctgtcgtgaatgctgctacgaacacgggtggacacatatctgctcgagttcctgctttcgattattctgggtctatatctcgaagtggtattgatgcatcatattgttagggaaacaggagcataggagaaccagggtgacaccgttttaaaatctgtccaaaaaaactagcaaggcacattccttgccagccctccaccatggccattaagatgtgtatagctgaggaaacagcttaatcaagcctgcaaggacaaactcctatgagagcaaaatgtctagataccccaatatggcattatatgcttttaagatgattacagttatgctttgatgcatttatgcaccaaaatgccaaggatagctttctttaaatcaacaaaataataaattttgtcatgctgccagcccacctgcacatacacataactttgcttagctattacatagataagacccccacataagtaaaacttaaaacaaagatgaggcattcctctcttggctttctgaggacaccctactctgtatctgagtcactttcagtaaatgatctcttcttactgcactctgcagctcacctgggagcccctcctgcaagagatccaaggaccctctcttcgggtctgaattgataactgttttctggcaacaatatggtaactctacttttatttgtccagaaactattgcactgttttacaaggcagctgcaccatgtgtccatcccactgtcgaaaaccaaaatttccaccagtttatttccactgtgatcagattcaggatcagctgctcgatgctcgaaagccaggcacgggagacaagggttggcagaaggaaagacaggttcaatcagagagccagaaaaccgagaaggtggtgaactagcgttctaaagcaccatcttcaattttagaattcaccatgggggtttcaaaaggaaatttgctgtgggagacatgcggagtgtgcagggtgcaggtctgtgcctttgttctggtggctatcatgggtatcacccaccctgagacctggctggcattatcctgacttcagaggaagagataaaggggtcagatgggagggaaaggaagtgggtgattaaaatatattttaaaaacggaggtccctggcctcacaatgattgaattggcatttgttagcgatttatggatcgggctgcatcccatctagaaatacaaaggcatttttgcccttatggcagaacagttggcgcacttttttgtcttttgtttttcttttgaaacggattctcactcggtcacccaagatggagcgcagtgctgtgatctcagctcactgcaacctctgcctcccgggttctagcaattctcctgcctcagcctcctgagtagctgggattacaggcgcccaccaccacgcccacctaattttttgtattttagttgagacggggtttcaccatgttgcccaggcttgtctcaaactcctgagctcaggcaatccacctgcctcggcctcccaaagtgctgggattacaggcgtgagccaccgcacccggccaacagttggcttttgtagggcttcttgagcaggaacaaagaaacagcaccatacaaaaaggcggctcttttaacgtctggttattttaggttactttccttttaagggttaaagcagagggacttccttctcttggcagctcacgttacttgggtcctttgagatcagatgctgtggatctcttgtgttttgaaaaaaccggcctgtttagggattttcctgtttttccaagtttcagtttgacgacatgcacttaacctgaaagactccatttttatttggtttgtgaagggctagagaaggagctccgtccacaacaacagtctcctatcaacttcatttaaccactaagtgcagaagggttccagtttccccaaagcctaccaccatcctttattttccattttatggagagtagccatgttaataatgtgtgctggttcttttttttcttttcagtggaaaaaatcatatttatttcatttttcaatagtaattatttattagtggtatgtgcgtgtctgttgggcactgcacaatttctcaaaccttgggatcagacgggaccatgccacctgactttcgaaaccttgctgattttcatgtggtaattgcccttcttcacagcaaccacggatgccccagcatcacaaagacatgatgtcagcaaaggaaatgtagagagaccgaatgtgaaatctgtgagccactggagctggtgtttcacatggtgtcagaggtggaatgctgctgtgcttcccctaattttaacatatccagggtccctctgtggacagctgaagctgtgaggatagaacagcaggaatgccgtaggaattagttggagggggcaggtaatggaagagctgatctggttgctaagcagctcagaatctctggagatgaatcataatggaattagagtaagagcagacagtgcagaaggggctactctgctccagccaaatgcagctgcagagaataagaaaagtgatgtggatgttccacagtctccccttttctttcctctcccctctcctcccctctcctcccctgccttcccttcccttcccctcctctcccctctcctcccctctcctcccctgccttcccttcccttcccttcctctcccctctcctcccctctcctcccctgccttcccttcccttcccttccctcccctcccctcccctccccttcccttcccttccttcttcctttcccttttcttttattttctttctttctattttttttttgagacagagtcttgctctgttgaccagtgcagtggcacaatcttagctcactgcgacctccgcctccaggctcaagtgattcttctgcctcagtctcctgagtagctgggactacaggcacccgccaccatgcccggctaatttttgtatttttagtagagacggggttttgccatattggccaggctggtctcaaactcctgacctcaaatgatccgcctgccttggcctcccaaagtgctgggataacaggcatgagccaccgcatccagccccaagtttcttaataagttctcatttgtttattctgatggtcttcatttgtaattgtatgtccattgcctgtatgtatatttggccagcaatcccctaatgcagttcaggatctgtgggaaaaatcaagacatttccagggggtccacaatttctagactatttttttaaagaacattaatattttatttgcttattttcttctctttttctctgcatgatgtgatattataatatttgaagtaagaagcagattggagaatccatttctcttccattaaggaggaaattaaaggagtttgcaaaaacttctaacaatatcacctttattactaagtttttgtttggaaaatataattattgttcacaaaatgtgagctatgttaatatacaatagatttgttgttgtcgttaagcttaaaaagtaacgtttgactatttataacatgatctatatgagatcatgttatgttttatttatatcttataccaagaaacatcctttgggagtttcccaataattttaagagggtaaaatagtttgagatgacaaactttgagaattactgtcctgggttaaattccttggttccgttttgctggattgaaagacacacacacttaatgtttctgagacatgatgccacattgctatgatgttccacagctgtttctctggctctattttctcacgggaaatgtaacccaggtctgtcggactcttaccaattttccagtctgcctcctctcataaattcagtgaaggaatttctttctctttctctttctttctttctttctttctttctttctttctttctttctttctttccttctttctttccttctttctttctttctttctttctttctttctttctttctttctttccttctttctttctgcctttctgcctttctttctttttctttcttttttctttctttctctttttccttccttccttccttccttctttctttccttctttgtttctttttctttttttttttcgtctttttcagaatctcgctctgtcgcccaggctggagtgcagtggcatgatctcggctcactgcaagctccgcctcccgggttcatgccattctcctgcctcagcctcccgagtagctgggactacaggcgcctaccaccacgtctggctaatttttgtatttttagtagagacggggtttcaccgtgttagccagggtggtctcaacctcctgacttcgtgatctgcgcgcctcagcttcccaaggtgctgggattacaggcatgagcctcgtgcctggcccagtgaaggaatttctatgggaagcgcacgtggcctccagttacatggatgttcagagatctcccctcatgtggggtatgattagatatctcagaagataatgttcaaggtatagtcttcagtttataaaccccagtcccgacatggggtgtcgtgggtgatcgtgggccagacatgtgccccttctgaacctcatttcctttacctgtaagtggaggatgggctgggtaaaaactcaacaaaatggccaacacattataggcatttaatacgttataactaggtttttctgaatttttacactaaataggaataagagttttaataattatgagcaaaagaggatgagaacaaacacagagtcggtgtctgtaaaatttctctcaataggccaggtgcggtggctcacacctgtaatcccagcgacttgggaggctgaggcaggagaatcactggaactcgagagaaggaggctgcagtgagccgaggtcatgccactgcactccagcctgggtaacagagagagattccgtctcaaagaaagaaaaaaaaaaaaggaatggatatagaagaaaaggaaaaaagaaaaaatatagaaggaaaagaacatagggaaactcataatttgggataataagcataataaagtcaaactcaggcagaagaatgtgattctaggagacagagagaggcaaattatttggcatgaggcctctgtgtttcccttaaatgagccgccccaggccctttgcacgtgttgctcctgccatcactgggtcttcatgtggtgccttcctgtctccattcaggactctgaccagaggtcacctctcagggatgccttctttgattcctgtccccagaagcttgtcatgcacctctaccttccaaccaccatggggttgattttttttatttcttccatatgtataaaaaaacaggatacatgtgcagaatgtgccagtttgttacataggtatccatgtgccatggtggtttgctgcacctattgacctgtcctctaaactccctcccctcaccgcctacccaccaacaggctctggtgtgtgttgttcccctctctgtgtccatgtgtgctcattgctgaactcccacttatgagtgagaatatgtggtgtttggttttctgttcctgtgttagtttgctgaggatgatggcttccagcttcatccatgtccctgcaaaggacatgatttcattcctttttttggctgcacagtagtccatgatgtatatgtaccacattttctttatctagtctatcattgatgggcatttgggttggttccatgcctttgctattgtaaatagtgctgtgataaacatacgtgtgcatgtgtctttatagcagaatgatttatattcctttgggtacatacccagtaatgggattgctgggtcaaatggtatttctggttctagatccttgaggaatcaccataccgaatcaccataccatcttccacaatggttgaactaatttacattcccaccaacagtgtaaaagcattcccatttctccacagcctcaccagcatctattgtttcctgactttttaataattgccattcatacagaatcaaagaagacttcgtatagccaagacaatcctaagcaaaaagaataaagctggaggcatcacgccacccgacttcaaactatactacaaggctacagtaaccaaagcagcatggtactggtaccaagacagatatatagaccaatggagcagaacagagacctcacaaataacactacacatctacaaccatctgatcttcgacaaacctaccaaaaacaagcaatggggaaaggacctcctattcagtaaatggtacttggaaaactggctagccatatgcagaaaactgaaactggatcccttccttacactttgtacaaaaattaattcaaggtggattaaagacttaattgtgaaactgaaaaccataaaaaccgtagaagaaaacctaggcaataccattcaggacataggcatggacaaagacttcatgacaaaaatgccaaaagcaatggcaacaaaggccaaaattgacaaatgggatctaattaaactaaagagcttctgcacagcaaaagaaactatcgtcagagtgaacaggcgacccacagaatgggaggaaatttttgcaagccaaagaaactatcatcagagtgaacaggcgacccacagaatgggaggaaatttttgcaagcaaaagaaaccatcgtcagagtgaacaggcgacccacagaatgggaggaaatttttgcaagcaaaagaaaccatcgtcagagtgaacaggcgacccacagaatgggaggaaatttttgcaagcaaaagaaaccatcgtcagagtgaacaggcgacccacagaatgggaggaaatttttgcaagcaaaagaaaccatcgtcagagtgaacaggcgacccacagaatgggagaaaatttttgcaagcaaaagaaactaccgtcagagtgaacaggcgacccacagaatgggaggaaatttttgcaagcaaaagaaactatcgtcagagtgaacaggcgacccacagaatgggaggaaatttttgcaagcaaaagaaactatcgtcagagtgaacaggcgacccacagaatgggagaaaatttttgcaagcaaaagaaactatcgtcagagtgaacaggcgacccacagaatgggaggaaatttttgcaagccaaagaaactatcatcagagtgaacaggcgacccacagaatgggaggaaatttttgcaagccaaagaaactatcgtcagagtgaacaggcgacccacagaatgggaggaaatttttgcaagccaaagaaactatcgtcagagtgaacaggcgacccacagaatgggaggaaatttttgcaagcaaaagaaaccatcgtcagagtgaacaggcgacccacagaatgggaggaaatttttgcaagccaaagaaaccatcgtcagagtgaacaggcgacccacagaatgggaggaaatttttgcaagccaaagaaaccatcgtcagagtgaacaggcgacccacagaatgggaggaaatttttgcaagccaaagaaactatcatcagagtgaacaggcgacccacagaatgggaggaaattttttgcaatctacccatctgacaaaggtctgatatctagaatttacaaggaacttaagcaaatttacaagaaaaaaaacaaacaaccccatcaaaaattgggcaaaggatatgaacagacacttctcaaaagaagacatgtacgcggccaacaaacatatgaaaaaaagctcaatatcactgatcatcagagaaatgcaaatcaaaaccacaatgagataccatctcacgccagtcagagaggctgacttttttggtttacttcctgttttgtaagatattgatcaataggatgctgtctgctacccagctgatgccttatattctccctctagtggaatataagctcctttgaggatggtagaaataatgaacccctggtttgcattactgattgtgccagaagattgctactgtgaatgaaaagctccgaaggacaaaaatagatccatacctgatttcctgctcattatcatgaaaaatattcatttctcaatgctgcttataccaaggaaataggaataaagtaacaatgcacacaaaagagttggaggtttgagtatagaaaagcagtcatgcagtagtactggacacaaagtgaatggagaagctggtcctatttccaggcagtgctcagtgtccttagggatgagtcaccacgaggttagagtgagaataggcagtggggcaggggctgttcctccccagccacgtgtacctgcaggagtgaggatgaggaatgacatggagggagtcatggctcatcagggttgagggtttccaagagaatcacatgaagcagagtatgaaaaggagatttgagtttgtgcagaagaaactggttctaacaattgaccatagacagtgatctgaaggtgggatgaagattagcgggaaatgggtgaatcaatactatgtttttcctaaagaaaaggaaaattggcatcaggtgagcagaagtcacctggaagataggcagtgatgttgcagatgggaggcttgagctgaggagatgggctgacagcctctattggtaacaacaaggctgatggcaatcgatggctaaaggagtttagataggaaatttgggagagaggagatcaattttcagatagtgaagtgttgggagggtcagctatgttagtgttcctccacatcagcactattgaaaatttgggcttgaaagttctttttttgcagggtggggaagcctgtcctgtttttgtaagatattgatcaataggatgctgtctgctacacagctgatgcctacagccctcctccagttgtgacagccaaacatgtttccaaaaattggcagatgtctcctcatggcaaaatcttccctggtggagaaccacagatattaacgtgtaggatattccccaggattatagaggaaagtgatgttggtgaggacaacagtccacatccacagagaattgagatcacacagaaatcggggcttttcatgaggctatgtgtcccaaccttgcatgttattttctgtaattctgatgggccacatcttggatcttgctgaccctggagggatgatcctgctgggtcttgtcaattcctgaagatagtaaacagctcccttgaaaggcagcctttcatgtggaaaccaatccagatcccactccccaatcatctcctctatggagcattcacactgacagccacgaatcactcagctctcctaatcaccccaggaccaggcatcagacagctcggggacaacccctatgcccagagccactgaaattcttcagagaagccaatcttgtttacctgctcatttacccccacttgttctttcccttggaaaccataattaaggctcttcactcacaagtccttccatccccttcctcttgccagatacttgtccttcctgtgtgactacctggtgtggtgtgcccctcctcttgggaatgtgagcaaacagctatatttgcagtaacaacttgtccctcagtctgttttaccgttgtgtgtgaaacttggtaatttctggtcttgattcatgcaattatgagcctcattttgtgggagtccctcgagtaccctgatgcatttccccatcgtgtgtgtgtgtgtgcgagcacgcacgtgtgtgtagttgaaggggagtttgggagacacggcattctcaagcaaattggagatgcagaccactttccctgcctcttatctatattattagaatcttgcccaaccctaaatgtccagtcccaaagatggagcaagacaggggccctggactccctcttctgggaggggccagggcacttttctttggatgctcagacgtgggatgggagcaggtgatggaggcgtgggctcagggccagagagcttggagacttccctctctgagcccagtattttccgccataaaatgcaggcacttgtaggtctcactcacaaccagggctgtggggatggccatgcgtatgttcctcagcattgaggcttctgtccaagaagctgaggggaggtgaaatctagcctgcactctttccaagttgtgcttagttcgaggataaataatcccaccagcgccactccctcattgatctctgcaaagccccttagcccaccaccgtggccttgggttcactcatgaaatttgagaaacaaattagttcaaggaacaagagagcaaataaatagtgacacagccattttcaggatctcatttttttcctgtttcttctcacatgaggcaatggtaatgctactgtaaagtgcctttgccatcactaggtggcactcttgaagcaatagaaagtatacagacgtttaacactttttatcttttcatttttaattgtggcaaaatacacagaacataaactttaccgtataatccattttttactaatattaattgaaaaacaaaggctggcaagtttaatttttttttttgagaccaagtctcgctttgttgcccaggctggagtgcagtggcgtgatctcggctcactgcaagctccacctcccgggttcaagtgattctcctgcctcagcctcctgagtagctgagattacaggcctgcactatcacacccggctaatttttgtatttttagtagagacggggttttaccatgttgaccaggctggtctcaaactgttgacctcaggtgatcacctgcctcagcctcccgaggtgctgaaattacagacgtgatccaccgcgcccatcctctaattttttttttttttttttttttttgagacggagtctcgctctgtcgctcaggctggagtgcagtggcaggatctcggctcactacaagctccgcctcccgagttcaccccattctcctgcctcagcctccacagtaccacagtagctgggactacaggcgcccaccatcatgcccggctaattttttgtgtttttagtagagacggggtttcaccgtgttagtcaggatggtctcgatctcctgacctcgtgatctgcccgcctccgcctcccaaagtgctgggattacaggcctgagccaccacgcccgacctaaaaatttttttaattgtaaaaaatgatgtaggccaggcacagtggctcacgcttgtaatcccagcactttgggaggctgaggtaggagcatcgtgtgagcccaggaattcgagaccaacctgggcaacaaggcaaaaccctgtcgctacaaaaaataaaaataaattagctgggcatggtggtgcaggcctgtaatcccagctactcaggaggctgaggtgggaggatggcctgaggtctgctgtgagctgtgatcgtgctgctgcactccaacctgggtgacagagcaagatcttttctttaaaaatggtgtaaattattacatagtttaacgttgatattttcatcatcttttaagtgtgcagtttgttggcttccattacattcgggttatttgcaaacatcactaccttccacgcccagaacagtcttcatcttgcaaaactggaattctgagctgattgtacatgagctctgcatttctcctctctaagcccccatgagccaccattctactttctgggtctatgaattaggctagtctggggcctgacctaagtggaatcatgcaacagtgtccctctggggctgacttattccactcggcatcatgtcctcagggttcctccgtgttgtagcatctgtctgggtttcctttctttgtaagactcagtaatattccattgtatgtgaacactacagcttgtttaccaatatccactcatcctttgatggacacttgcggttttccacctttgactattatgaataatgcatcgtgtcacatttccatcaacaaggcagaagtttcctacttttccaaagcctgccagcacttgttattttcaggctgggcgtggtggctcatgcctgtaatcccagaactttgggaggctgaggtgggcagataacctgaggtcaggagttcgagagcagcctggccaacatggtgaaaacatgtctctactaaaaatacaaaaattagccagaaatctcttgaaccctggaggtggaggttgcagtgagccgagatcatgccactgcactccagcctgggcaacagagtgagactccgtctccaaacaaacaaacaaaaaaccacttgttattttctgttttatggatcatagcaatgttaataaatgtgtggtggtttcttctttctcttaaaaataatttttcttttcaaacaaaaactattttatttagaaaagccatgttgaatcatggcccagcttggaaagttatttatttattaaaattaattaatttttattaaaacttttttaaaatgtagatacaggcttgttacaaggacatcttgcctgatgtggagtttggcttctaatggccccgtggcccgcgtagtgaacgtggcgtgagacaggcggtaccttcccttctgctgttgacagtgtctactgttctcatatccttgtgcctgtgtacccaatgacaggcggtaccttcccttccggtgttgacagtgtctactgttctcatatccgtgtgcctgtgtacccaatgtttaactcccacttataatggagaatgcatggtaaaaatcattctttattcttcaatcatggcaagtccttcatcatgggacgcacgtgcctgttggggactgcaaacctcttatcccttggcatcagcctggactgcaccactctcatttccttatctatgttaatttttgggtggtgattgcttctcttcacagcagccactgacacccccgcatcacagagatgtgatgtcagcaaaggaaatgttgaaactgtgaacccctggagctggcaggttctgtggtgtcagatttcgaatacagctgtatccgatgccttcaatgttaaggtacctaggatctctctgcagagatcgtcacagcggtgaggatagaacagcaggaatgcagtcggtgttcactgcaggggagagagtggaggagctggcctgattggcaggcaatgctcagtgtccttgttggagagagtcaccatggaaacagagtggaaacaggcagtgggggaggggctgttcctccccagccaaatgcagctgcagagaagaaggaaagtgatgtggggccggtgcagtggctcaggcctgtaatcccagcactttgggaggctgaggcaggtggatcacttgaagtcaagagttcgagaccagcctggccaacatggtgaaaccccgtctctactaaaagtacaaaattatacaaaatacaaaaatacaaaaaatacaaaaattagctgggcatggtgatgcacacctgtaatcccagctacttggaggctgaggcaggagaatcacttgaacccgagaggtggaggttgcagtgagccaagatagtgccattgcactccagcctgggtaattcaaagtgaaactccatctcaaaaaaaaaaaaaaaaaagagaaagaaagaaaaaaaggaaagtgatgtgaatgtcctgtagtttctttcatggataacctctcatttgtatgttcagatgatcttataatttcatatccactatttgaatatatcttacatcaatgttgtcccaaaaggtagttcaaggaccttgtgaaaatcaagaccatttgaaagagttcacaagttctatatgttcttaagaacactgttttatttgcctttttccttcccattttctcttcacgatgtaatattgtatgtttgaattaattagctgaaatgagaattcggctgctttgtattaagaaaagatttctttttgtagagacaaagtcttgcctttgtcgcccaggctagagtacagtggtgcaatcatagctcactgaaacttcaaactccttggctcaaggaattctcccaccatagcttccagagtagctaggactacaggcacatgccattcaactggactaattaaaaaaaaattttttttttttgtagagggggagtctcactatgatgaccacgctggtcttgaactcctggcctcaagcagtccttctgccttggcctcccagcatgctttgatgacaggcatgaaccatagcacctggttattaagaagagtattggctgggaggagtggctcatgcctgtaatcccagcactttggaaggccaaggcgggtggatcacaaggtcaagagatcaagaccatcctggccaacatggtgaaactccgtctctactaaaattacaaaaattagctggatgtggtcacgcacacctgtaatcccagctacttgggaggctgaggcaggaaaattgcttgaacctgggaggcggaggttgcagtgagccaagatcacgccactgccctccagcctgggtaacagagtgagactctgtctcaaaaaaaaaaaaaaaaaaaaaaaaagaagagtattaaagggatttataaaaaagtgaaacagtgctccctttataactaattttttgtttggaaaaagtaattattgttgataaaatgtgggttctgttaatatgtgatagggttgttacttttttatgttttaaatttaaaaatttctcagcttcaatttataatatggtaaatactcctagatataaaccatgcaaagaaaaattctttagagattctcaattatcttgacaagtatacgggccttctgacttttaaaagtttgagaaatactattttaggctaaatttctaggtataattttgtggggttgaagaagacacatgcttaatgtgtctgatccacgatgccctatactttcagagtaagtgaaagaaagtatagagctgttttctggctctgaaagtatagagctgttttctggctctaaattctcatgggagtgtgatttatatgtgtcaggcttattgatttgccaagccgcctaccattataaacccagtggggagatttctccaggaagtatgctctgactcctattacccaggctttcagagatctctcatataagtttagaattcccagaagagaaggtagaatgtatattctcaagtttataaatcccaggctaacattcattactgggtgatcatgggccagacacctgcctcttttgagcctcgctgcctttgcctgtaaatgaggattgggggtgtataaggatttggcacaatgcccaatacattgtacaaattcaataaataatagttgtacattttgcatttctaccataaataagaaatacagtagtaatttaatgatgtgagcaaatgatagttagaaagaatagagaggcattttctttgtgaaagtttctccaacgactgtatccacaatggttaaagctcttctctccccaattctggtatgataggtgtgccacttctcctgttccttgtctctcttggtgatataactgtttacccatttccttcactgggccatgaactcttagtgttcgggtcgtgtctctaaaacctgtatcaatagcactttgaacttaaaaagcaggtaaatagtttcctggcttagcccttgatttaagaatcaggacagaggccaggcgcggtggctcacggctataatatcggcactttgagaggccgaggcaagcggatcacgaggtcaagagatggagactagcctggccaacatggtgaaaccccgtctctactaaaaataacaaataccgggcatggtggcacacacctgcaatcccagctactcgggaggctgaggcaggagaatcacttgaacccgggaggcggaggttgcagtgagccaagatcgtgccactgcactccagccttgatgacagagtgagactccatctcaaaaaaaaaaaaaaaaaaaaaaagaaaaagaaaaaagaaaagaaagaatcagaacagtaccatcaatgactaaaagctatccttggggctgaaggacaatgagactatggactcattgataagggaagtagttgatgctaaccaacttattcaaaggtgacctcaaagtatatttgtgggataaattgaaaatttattattttacaaataagaagacagggccccaattgggtcttctgcctacagctccacataaagactggttatgtgtttatttcattattcaacagtcaccagcacatgccatgtgttaggcacagtgctagggacagagggaagagtagtgcatatatgataccagcattcaaattcttcacagtctgtgggttcactgaaggtcctacgtaaccattccaatgtttgtattcttgtttctctaataatctagagcaatacccgtacatgaaatatgttgactggttaataagtaggctttctggagaacctgaaaaaaaaaatcaaactatagtccggcgtggtggctcatgcctgtaatcccagcactttgagaggtcaggagttcaagaccaacctggccaacacagtgaaaccccatctctactaaaaatacaaaaataaaataaaatacaccaggcatagtggcacaggcttgtagtccaagctactcaggaggctgaggcaggaggatctcttgaatccagggggcggaggtcacggtaagccaagatgacacgactgcactccagcctgggtgatagggtgagactccatcttaaaaaaaaaaaatcaaactgtattgaaggatgagtaagaagaaagaggaaaggggaaaatgaaggagaaagggggaaaatgaaagagaaagagagaaaataggtagtttgcgatatggaaggatgaagagaaagcagagagggaagagagagcattcagaccaaaggagattctaagggagaaatagaggcaaaatgtttagctccagccacatggttatatcttataccctggaattaatcagcctcaggaccttttcatgtgcagctctttccatcaccctaggtcttaatgttgcctttctctgactccagttaaggttctgataaaagttaaccacccaagaaagccccccctatatttctatttccttaatagaaagcagccgaattctcatttcagctaattaattcaaacatacaatattacatctatttccttctttctttctttccttcctttcttcattccttccttccttcctttctttctttctttctctctctctctttctttctttctcttttttttttcggagtcttgctctgtcaccaggctggagtgcagtggtgcaatctcagctcactgcaacctccacctcctgggttcaagtgattctcctgcctcagcctcctgagtagctgggattacaggcgcgcaccaccacgcccggctaacttttttttgtattttagtagagacagggtttcaccatgttggccaggctggtctcgaactcctgaccttgtgatccacccgcctcagcctcccaaagtgctgggattacagacgtgagccaccgcgcccggctgcagatgcttcttttatttgcttgcttttcactgctttcgatccactggaatgtaaactccatggataatgtttgaaaatgaacctagcgttgtgagtttctgctagtttcaggtttgttactgggaatagaataagtccaatgagcaacaatagtaactatatctcattttcttttgagacatcatgaaaatattcactctgtgatgctacttgtatttgggaaatataaatcaagtgaaaatggggatgacaggcttggaagtttaaggatagaaaagctggcatgcagcaagcattcatcggagggggattgaatggagaaagtggtcttgtgttcaggacgccctcggccttcttgacagcgagtctccatgaaagcagagtgagaacaggcggtggccgagggtctgttgctcctcagctatgtccagctgcatgagtgaaggacagagcaggcagattcatagtccagcaagcatttatttttctaagagactaacaaaaagtagaatatgaaaaattgcttcatatgtgtgcataaaaattttgttttaaacagagatcatagaaggtgaccttgaggtgaaagttaagatcaatgaaaaatgggcaagtcaatggagcattggtccctaatgaatgaagtgatgttggcatcttgtgacaagttacctgaaatgtaggaagtaatgttggagatggggtgctttaggtaaatggatggaggggtttgggttattggtaatgagaaggctaatgggaatggattgctaagaggcattggacagaagcactgaagaagaggaagtcaatatattgatagtcaagaggttgggagaaccatccatattaggtattatctaccttagcaacgtagaaaatttgagctggataattctttatgtcaggggggttctgttctgacattatagaatgaggaacagcatccctgactactatccaccaaaaagctcactcgtcataatcaattgggttattccagggatgcaaggatgtttcatcatatgtaagtcaataaatgtgatacatcatatcaatagaatgaaggacaaaaatcatataataatttcagcagacacaaaaaaagcatttcacaaaatttaatatcctttcagagtaaaaattctcagcaaactaggtgtggacagaatgtactcaatataataaagaccatatatggcaaacccacagctaatgtcatgcttaatgagaaaatgttgaaagccttttctctaagatctgggacaagaacaagtatgcctattcccaccacttctattgagtatagtactgcacattctatccagagtaattaggcaagagaaagaaatgaaggcatccaagttggaaagaaagaagttaaattgtacctgtttagagtgacttgaccttacatatagaaaatcttaaaggttccattaaaaagtgttataactaataaacaaattcagtaaagttgtaagatacaaaatcaacatgtaaaaagtagtagcatctcgatacactaatggcaaaatatctgaaaaggaaattaagaaagcagtttcatttacaataagcttcaataaaataaaattcttaggaatgaattaaacctagatggtgaaagatcactacactgaaaactatacaaccctgaggaaagaaattgaagaagatacaagtaaatggaaaaatatcttgtgtttatagatcagaataatgaatatagtgttaaaatgtccatactacgcaaagtggttcaatgcaacctctctaaaatcacaaatggcattcttcatagaaatagaaaacaatcctgaaattcatatgaaaccataaaagacccagagtagccaaagcaatcttaagcaaaaagaataaagctggaggtcttacactacctgacttcaaaatataccacaaagctataggaactaaaacagggtgattctgtcataaaaacacacacatagaccactgtaacagaataaaaatcccagaaataaatccacacattcacagccaactgttttttacttttgacaaagataccaagaacacataataaggaaaggacaatctcttcaacatattgtgttgggaaaactggatatctatatgcaaaggaatgaagttagacccttatctcaccttacatacaaacatcaactcaaaatgaattaaagacatagagggaagcctcaaaactataaaactaatagacgaatacataagggaatatccccatgaaatataaaggaaaagtcattcacctgggcaatgactttttggatataacctcaaaagtactggcaagaaaagcaaaaatagccaaatgggattgcatcaaactaaaatgatactgcacagcaacgaaaacaatcaacagagtgaagagacactgcacaatgagagaaaatatttgcaaactatatatatctgatgaggggccaactcacactcacactcctcatccacgctgatttcaggtggtgatcttttctcttcacagcaaccactgccaatccagtatcacaaaggtaggatgttagcaaaagtaatgtagagagagctaatgttgagtctgtgaattgctggagctggtagttcatggtgtgtcagatgtggaacattgctgttcttcccttaagtttaaagcatggggataccccagcagacagttgcagctgtgaggacagaaaagcaggaatgcagtaggttttcactgcagtcggagagaatgaaggagcgggtcctgtttccaggcagctgtcagcatccttggagatgagttgccatgagataagagtgaaaacaggcagtgggagaggagctttttctccccagccacgtgcagccacaggagtgaggggcagagcagaaaagggtcagagtccagcagcgatgggatattccacaagaattgcatgaagaatataaaaaagagatttgcatgtgtgcagaaggaattgattctgaggattagccatggaaggtggccgggtgtaaaggtgaatctcagtgtaaaatggtagaattcctggagcgctggtcaccaaggaacggggggacattggtgtcaggtggggaaggggtcgcctggaagtcagggagctgatgtaggagatgggatgctgatctgatgggataaagtgattttggttattggtaatgagaagttcaatgggagtggaaggctgagggaggattggagaagaggtcaatatatggatcgtcgagagggtttggaggatcattataatgggttttccaccttggtggtgtggaatatttggattggataacgtgtcgtgtggggacagggacttcctgtgcattggaggatgttgaactgtattcctggcttcacaggaccctttcagaggtgaaaattaaaaatgtctctagatattgacaagtgtccccagtgggcaaaatcaccctggcttggaactactgatctaagtgggttataatagtcaaccacagtgtggatcgaagtattttggggtcgtcactccacatccacagagaactcagaacaacaggaagtggggagttccctgaggatgcgggcaccaaaccatctttaacttcctgtattctgatgctttgacatctgggactggctgaccctggagacatttcccctctcagctgtcttcaaccgctggagatagtcacaactttcctgcaagtgtgcctttcatgggtaaaccaaccagtcctagcttacacccccagccacaccttatggagctctgagccacaatccacgtgcacagtcacccaaggtcaggtatcagaaacaacgaaggacgtcccataacccacagctactaaaatgacctaaatgagcctgtcgtcagcctgcttatcctgcatgacctgtttcttccaaagggaacttcagtggctttgtccacatttcctcctgcatctctctgggtttttgctgaccaggtgattccccgtgtagctcccctggctgtgctgtgccctcgacttgtgattatgagcaacaaactttccttttaatggcaggtatctcctgatctgtttaactcctgtgtgtgaaactttgtgattcatgcaatgagaacaaggctttacgtgaacagaccagagcccaggtgcagggcggtcattccagagcccaggtgcagcaggtgcagggcggtcattctgcccacacaggtatgtgttgggggagggcaagttgaaacagagcctgagagatgaattcattaatgaacaaatttgagccccaagccacatttcctcctttacagccaccttggtaggaccctacccaagccccaaatgccaagccagaatgcagagcaagacagcagccctcaaatcccccctctgggaggtgccaggactcccctccttggatgctcagagacaggatgggagcaggtgacggaggcgtgggttcagggccaggcagcctggagacctcccctccctgcgcccagtgccctgctctgtaaaatgcagacactcctaagacctcacgcacagccagggccgctggggatggccgtgcgtattctaccccgcacttaggctcctgtctgaggagatgagaggatgtgaaatgcagcctgcactctctccacagctgtgtccatgccagggctcaagatcccacacctcagcctagcattgctctgtccaaaggcagacagcctggtacagccatgtgtgcagttattttcacttcaaaaaaaaccttattaaacaaaaaccaaatatatgtaaacacaccagttttttaagtatctcatttttttttctaatttgaggcaatgcctattgtcaagtatctttgctgtcattagacggaactcttgaagaatggaaaagtaaataggtattctttcttaatatttagttgtagcaagatacacataatacaaaatttgcagccacacacggtggctcatgcctgtaatcccagcactttgcgaggccgaagtgggaggatcacctgaagtcaggagttcaagagcagcctggccaacatggtgaaacttcatctctactgaaaatagaaaaaaattagccaggctaatttgattcatgtctggctcccccactcaactgacagcaggccccaggacagccagtggctgtgtcatcatgatctgctttgccctcactgtcctctcttacatccgcatcttggccacagtggttcagatccgttcagcagccagccgccggaaggccttctccacctgttcttcccacctgggcatggtgctcctgttctatggcaccggcagctccacctacatgcgacccaccacccgctactccccgctggaagggcgcttggctgctgtcttctactccatcctcatacccaccctgaatccgctcatctacagcctgaggaaccaggacatgaagagagccctgtggaagctctatctccaggtgccatactagggtctgccatctggatgcgggagggacccaaaaatccaccttcccaagattttccttgtggtcgtggtggaagtgttagtgcctccagagacccccaggaacacacctattcgccaaagttgtcaacaaagttgaattgcaatgaatcatgcaggagaaccctgatggatgtctggataaaatggagacaaatccaatgtgcatttaatttaggcaaatagtattaaatgtacacaggggaggagagaaagaggaggagcaaataatttaaatagggtgggtgattccacccaagagctcactcaataaatttatgacctggactacgaatccaataggagactgtcctctcagcctgcctcggtttccatgcacttccccatgtggacatgttttatcctgctcaatgtggttctaatgtttagtggtacacattttttcatctagtgtttgtcctaaatgcaagccaaagccttcatcacaagcagcagcatctattccagaagaaaaataggccatattggacgtgcagagaaatggttggtagtcttcacgcggctgcttcctaagggaaagtcaagggtacctttatctttctgcaatgtttctctgatagcaaaccctgtatttgttgtatttctggttcagctgctttaacagaaacaaaataacagcaacctaagtcatacagaaggcttgtttctcttttgtgtaatcatttgtgcttggaggtgaccctgggtgtctctatgccacagtcatcctgaggccaggttccttctatctcgttgctctaccatccctgaaggtttccttattcctatggtgggagttggatcactagcacctcattcacaatccagctgctggaagagggacagaggaaatggagggcaagctacatggttttaagatgtgacccagaagttatacgcttcacttctgctaacatcttattggctggtgtttagccacatggtcacactgaccgcaaaggaggctgggaaatgttgtctccagctgagagcccagataaaactcatgaaaggagagaatgttatttactaatttgtaatcagtccctcacatctgatctcttgatgagccaccatttatcttcttactcaatcctaccattatgcttccaatggccacctgtactaatgtttagtggcactaaaactttacatacattgtcacttttatgtacattatctctaatattcaaaacacctctgtgaggtagttgtaattttcctcattttttagataagcaaaataaaattctgataagttaggcagtttacccggagttaagaaggttgagaaaggcttgatatttttagattgatatttttaggtttgatatttcagaatcactcaggattctttttttttttttttgagatagggtcttgctctattgcccagacatgagtacagtggcatgatcatagctcactgtagcctcaacctcctgggctcaagtgatcctccaacctcagcctcccaaatagctgggactacaggcatgcaccaccacaccctgctaacatttaattttttttttttttttttttttttgtagagatgggagtctcattatgttgcctaggctggtcttgaactcctgggctcaagcgatcctcccacctaggccttccaaagcgctgggattacaggcatgagctaccatgcccagcctctacttcttttaatgatagagattgaattatatgtgtctagggctttaaaaaatcttaccttacagaggcatttctcagaagttttaggagtccgttgcagtcctaccaacatatccctgaggattgaacaattctgctctacctgggaccaccctttgatcaaagacataacccttaggggagacataaattggccaaagagagagaaaatgggtaggtgaccagccagcttgatcaagtctctggtgactactggggcatggcagatgcacacaaaggtgaccaccaattagtcactttcttgtataaacccttccccttgagtgtggtaggaacctgggatttgccttcagccaatagaatatggcaaaggtaagggttggtcacttccacagttatctgagagctcctctctgaggtgaaaaacacctcattctgttttactatctccattacatttaccacccttatgaaattatataaattattgagtgtgtttgttctaccccaaccaccccattcctctgaatataatatccatgaaggcacggtcttgttttcttcaatgccgtatcccctgtgcatagcgtagtacctgacacatattaggtgttaaatatgtatttttatgaagaaataaatgtgaagcagaacaacaaaaaacaaaaaccagagctgttcttgtgtaaacgagggtgagagggctgggatccttgtctatttggtgttttcccaacccctcagcacagtcatttctgcaacacctacatgggatctttgagctccacaaacctggttgagacacctcttctctaatcagattaatacatgctattgaatagaaaccaccattgattgtaagatactccactatcttgcattccattaagaaagaaaaagacactgccaatcaaattgtgacactccatcaataaaacatcttgattttccatgctaaaatgtgctcctcagccttcagatcacagctgaaatgtcacttcctgatcacccctgctggccaacctgtgtcatttctccttctatactctcagcgaacacacactgcaattttaattaattatgtaattatttgtttaaaatgtcttctgaagcaaaaatgaaaacagaatgaaggttagaattatgtctgcttgcatactattatccagtggtatgttgataaacttgctctctcaaaaaaaattataaatagcatttgacagtttctatggtgtaaatattctcaccacagctgatgtcaagctatcaatagttcaacaacttatttccaacattcctgaatatttataattggctcttgtgagctgacatcagcttgctccagcacagttcacccaggaccaaacactgtatctgtacataataatggcttaataaatgattggttagtgaatgaataaatggttgtgagtcacactgaatgaatatgtagcaggtatttcaaagttaacagttcaaaatacagccctttatgtctccttcatacctgtggtttttccgttttcacctcagttagcagcactgacatctgctggtcactcagggcaaaaatctctaggcatattgatttctctctctccctcacctcttcccagcactcttctcattatatccatgagtcctgtcaattctatcctcaatgtgtattctattctattccaaacccatccctcacaccatccccatggccaccatgctaacccagcacatcatggcctggccacaacagcctcctgcctggattccctcccttcagtcttacctttcaaagctcatcctccctccaccttaactccccacaccctgcctatgcgaaagccacagggtgttgctgaaaagataagtcaggtcccatcatcctcccgctgcggccctccaggtcctccacgatcggaccccacccagctctgcagcctcctctatcacgctctctcctgcagcttttattcccagctatgctggccttagctcagttcttcaagcaaaccattcttctccctacctcggggctctgcacttgctcttccgtcagctgaaatacccttccccaaatctgagcatcaccgcctctgcatatctgagcttcattctagacgtcgtctctttggaaagacctctcctaaccacttctttaagtggcatcatcccctccccctctcgcacatccccccgttttattgctttctgagcccttatcactgttggaaatcaccgtgttgcataactttgcagagcctgagacaaggacttgggaagggtggtttatgcctgggaaaaggcaggccgggtgccgggatgtagtgcgcctgcacgccgtctccagactacaactcccagaatgcgcggcgccccgagcgtatttccgcttccggtggcgttttagcgggagatccgagcgtctcggctggtggaaggggcgaggagctttgcagttgtgtgcgagtgtgtacaggtgagtttgtccgtacgcgtgattaagtgtgtgcgtgtgatcaagtgtgggggcgagtgttgcgtgagcaaacctgtgagagggtgagagtccgtccgtgtaggtgagggagctagcaagagtgtgagcgagtgcgaatgtccctacaagtgtgggcgcgtgatgtgtttgaaggtgtgtttgttcgagagggtgtgtgttggggtcaacgagggtgcatgtgtgtgagtgaggaagcctgagtgtgtggtgtgtgcgcgagccagcaagctggaatggctctcgcgtgcttgtagatcatgagcgtgacttggtggctttctgtgatggtattgggtgtgtatggctttttgctgtccatgcatgattgtgttagcttgactcgtgttggtgttgtttatgtgggaatgtgagggatttagttcatgagattacgtgtgtgttgctctgcagtctcaagcttgctgggttagctgtttctgaataggatttgacccaagttcagcgtcagcttttcaaacagcctaaaaactctggccttgggcattgagaaatcagaaagtttttttttctctctgtccctctgactataacagttgtggaagaattagacaattctaagaaagaaagtttcctgaattagcattaggaaaactagacacaaaaatcccactttctgaaaaaatgagaaacttcctaattgtaactaaaatgatcagtaaacaagccacttgctggtttggaagaaaggaaacacacctatgtgttctctttctgccaacacttgaattctctggtccaactgttacgccgtctacgtgacttccattaagaacaagcagcacccttaaatgcatctcaagtgttgtatgtcgctaaaggccatgaccggttcttggttttccttatctccaagctaagcctcagtttctgcatgcacaaaattaggaagataatatccacccatctacaactcaatgcattgagtcacatgaaagttttgtagacaggaaaagttctgtggcactcggcctgatcaagtcagctttcctgggtgttgctgagttaactataaggattatatggaaggaccatccctagactaattctagacctggctcctaatgtgcaggtcagcagttctttccgtgactggcaagtctgaggtcatttgcaagttaaggaagataaatgtactgatatctgacttggtttgcgccagagatgattttttcaaaagatgtattaactgggttggatgcagtggctcacccctgtaataccaacactttgggaggctaaagcaggaggatcgcttgaccctggagttcaagaccagattgggcaacatatcaagaccctatctctacaaaaataaaaaataaataaaaaattagctgggcatggtggcacttgcctgtagtcctagctgcttgagaagatgaagtgtgaggattgcttgggcccaggagctggagggtgcagtgagatgtgatcacatcactgcactccagcctgggcaaccgagcaagaacctggctcttaaaacaaaaatttattaactggaaaattaggcttcttcaacagttatttcaaacttaagagccggatgcccccacataatattaaagctgattttcaaggatctcttttctcaatgtaagaatgagtcccaaaagtgagaaaagatctgtgaaggctgtggtggagcagtgaaaagcattgtaattttcttgactctttggtccaaacatacaggagggacttctttccagtaaacaggagtgaggaaaagacaaggaatttaaatatatctatgtatgatctgcaaaatacacgagctgtggcgtataagttagaaagatccagccatctttcatggtttgcagcagtagatggacacagctttgcagaattgcagaacttgggtgattgagatacctaaacctggagttttgaatcccagctttgtcattactagttgtgtggccttaaacaagtcacatcacctccctgtgccttagtgtctctgtatgtaagatggggtgttgttacccatctcacagtaatggtgtgagtgaccgatgtgaatctcccagcatccagaaaggccctccagtctaggaggggccctgagactatcaacagtagccagttaggacaaaccaaactgaaaatagcaattatcaagcctctattcactgacttcaatagcataaacagaggccaaaaagaaaaaagtgccagcttctctgttctttttcccacgtagcagcaccgggcgagggtcagatgaatctatacaggaggtagggctcatctccctgccagggaaccctgaacaaagggccccagatcagacttctcaagtcgggatgattttacctcccagataaaatgtcgaatgacatttttgcttgtcacaattggagaagcgggtgctcctggcatccactgaacagaggccagggatactactaaacaccctacaatgcactggatggtccacaggagttgcccaacaccaaatgtcaactgcaccagtggagaaatcagtcctggtgctgctcccacatctgatcctatcactctccctctcactcgcaacccttctactgtctcctccaccaacatacaaagctattttctgaccaaagagcttcgctcatgctgtttcctctgcccggacactctcttctccagggtcccaggctgacttctcatctgatggtctttgcttaaaggccatctcttcagagagccttttttggaccaacctgtcttaaattagccctcccacttccatggtaactctctaccctctttcctggttttatttttcttcatagcatttaccaccttattttgcttattgcctgtctcccccatattgcacattaaagtttgagaaatactggtttcaagaaaggattgaaaactgaggatcctacaggggccagcagagatgatcttgggtgactttatttttttattttattttattttattttttattttttttaattttatttatttatttttttttgagacggagtctcgctctgtcgcccaggcgggactgcggactgcagtggcgcaatctcggctcactgcaagctccgcttcccgggttcacgccattctcctgcctcagcctcccgagtagctgggactacaggcgcccgccaccgcgcccggctaattttttttgtatttttagtagagacggggtttcaccttgttagccaggatggtctcgatctgctgacctcatgatccacccgcctcggcctcccaaagtgctgggattacaggcgtgagccaccgcgcccggcctgggtgactttaataaagcagccaaatgtagttagtctggttctaaaatttcagaattccttggcaatgccgaagtgaccctattcttgagatgctggctttttagaagaaatataagaaaaactctatagaagaaaactcacaactgcaaaaacatgcagaaataactaaggaaaacttgtgacattttgataagaaaactataaagctttactgattgatacaaaagcttgaatgaatgaaaacacagtatcatattcctggatgttaagattaaatgtaacaatgttaatccttcctaacttataagttcattgcaataataatcagaaggttggtttttgattactaaagataaattttaatctggaataacggaaacttatatataacttcacataaatttatgcatacatgtacatatactttttaaaggcacaatgatggaaaacattaaatatagccataaaaattaagaagaatatagatctaggataaaacagggcaacaagccaataaaagcaagtagatggtccaaatatagaacctacattataaaatataacaatttataatttactaataatgttggggcaattaacaatgaggaagaataaatttaattctcttttcatacaatatgcccaagtaaattcaataatcactaaagcatatttttaaaactccagaataaaacactaatgtttacagagggttagattttgtagggttggaagaaaatagaaggattgaaatatataaaaattgaaacattttcaaaaaataaagaaaataccaaagagggaaaatcatttgcagccaagatgacaacaaagaattaatatctttattatgcaaagagatggttcaaactgataggaagctattaaagtcacatagacaaatgattaaaagacagacaatgtgaagagaggaaacaatggcttaagaagcttacaggagaaagttcaacatccttaaaaatcaaagacaattaaaatgagatgccctttcccctattagcaaagttgctactaaacaccctacaatgaaaagtgctgttattacataatgccagctgggcgggaggtgtggggggtagtgggtgtgtgtgaggaacacgtatccccaagcattactagcagtagcagcagtgcaaactgatgtaatgtttccaaaaggaacttggatatatcaaaaatcttaaaagcaattatacaccttctgatgcagcaattcctctttggcaaatatgtatcgtaaagaaattttacatttggaaaaaggtttaagcaccgaaatgttgattatagtatgttcataactatgaaaaattgaaactgaattttacctcctaacaacagaggaggagccatccacagaaagcactgggtttgctgtgccactggtaaggcggtgataaccacagacgagtgagtgatgacagcagttttgtaaggtataagattgggtagaaaaacaaggtatactatcgcacacatggaatagtcacagctatatgacaactatctataaataccttaaaaataggtaatacagggttgggtgcggtggctcacacctgtaatcctagcactttgggaggccaaggcaggcagatcacctgaggttaggagttccagaccagcctggccaacatggcaaaaccccatctctactaaaaatagaaaaaaaaaaaagccgggcagggtggtgcatgcctgtagtcccagctacttgggaggctgaggcaggagaactgcttgaacctggaaggcagaggctgcagtgagccacgatcgcgcccctgcactgcagcctgggcaacagagcgtaatacagtcatgagggtaacaaagtggacaggtatagaccatgaaaatgagatctttacttcagccactccccagaggcgactaccttcataaatctagtcattaattttaagttacaagaaaacagactaaaaatgttagtggtgttcatagtgtatttttctgtttcggggcagagggagggagagagatctacatttctgtaaagtagttgcctttaatgagtcaaatattgctttaaaaagaaaaataaacattaatccatcagaaatgtgtacttaaaaggaaactgagttcacacaaattagtaagaaaaagcataaagacaaaaaagctaaagaggtaaagggcctaggttatacataaagaagtttttaaaacttatttggaaaaaatgcataataataatgcaaaaatggattaattattgttaataataatctttttattaccaaataggtgaagatttttatctttttattaccaaaaagatttatctttttattaccaaataggtgaagatttttatttatctttttattaccaaaaagatttatctttttattaccaaataggtgaagattttttggttgttaagtgaataaatacccagtgcaggcaaagttatttaaagggagtatttatttggtaccagggtgacaaaggcagttctttgcacatacaaaaactgcttagtgtgtcttgtttgccttgggtgctgtgctgagaaagatccaaccctgtcctcaggttcactggaaccagagagtgcataactggttaacaacgcctgccagggactcgagagggaggattgtaagtttaccacctatttcatacctctggccctccctatgctgagggctacaaatggcagagcccctccacaaacaaatccagcaggatctttcgagagccttagaaatgttcatcacatgtcatctagtgaaaccactttttggaaatcgattctaaactgtaaatacagtaatttatgctttgttaatcagacttttatataaattaaaaattgtcacaaaatcagaaaagaactttaaacttgtaatattatttttaaaaacctacacatagaaaaaaatatttgtagaaaaaatactaaaatatgataaaatgtggttgcgttttgatgtgttaactatggtttacaactctagtttattgctgctaataaaacattttaaaaaataaattttaggccgggtgcagtggctcacgcctgtaatcccagcactttgggaggctgaggtgggcacatcacgaggtcaggagtttgagaccagcctgaccaacatgaggaaaccctgtctctactaaaaatacaaaaattagctgagtgtgatggcacgcacctataatcccagctactcaggaggctgaggcaggagaatcgcttgaacccgggaggcagaggttgcagtgagccgagatcataccactgcactccagcctgggtgacagagcgagactccatctcaaaaaaaaaaaataataataaaataaaatttaaaatactccctaattgcaactacttgttactgagtgccttctaaataccaggcactattaggctcttttctatagatgaactctagaccttttaatggttctcccaggggaggatccccatttcctaagaaaacgaggtataatcagcctctaaggaggaccttgaaatttgacctcagctctccctggctccaaagcccaccctctctcttctctgccaagggtctcttctacttgtgaatataactacctccctggacttgtactagttgcatacctagaactattaggaagtttattagccttctctgttttgcaaaattttctttaatatgctcaatattatttgtatagtgaggaaacaatacctaataaaactatgttaaaaatcatagttcaggccaggcacggtggctccacacctgcaatcccagcactttgggaggccaaggtggggcgggtcacaaggtcaggagatcaagaccatcctggctaacacagtgaaactccgtctctactaaaaaaaaaaaaaaaaaaaaaaaaaaaaaaaaaaaaaaaaaaaaaaaatttgccaggcatggtgacgggtgcctgtagtcccagctacttgggaggctgaggcaggagaatggcatgaacccggaaggcggagcttgcagtgagctgagatcgcgccactgcactccagcctgggtgacagagtgacactccatctgaaaaaaaaaaaaaaaaaaaaaaaaaaaaaagagaaattataagcaaccccagtttccaaccatgaaaggccagatgaaataaattaggacacatccatgcaaccaagtactaaaaggaaatttaggaatgtatttctgtatatggaaagatgttcataatatatgagaatgaaaatgacagccctcaaaacagtgtttatggtagtatatttcaattcataaaaatataactttttttttctgagatggagtctcattctgttgtccaggctggagtgcaatggtgcaatctcagctcagtgtaacctctgcctcccaggttcaagcgattcttgtgcttcagcctcccaggtagctgggactataggcgagcgccaccatgcccggctattttttcatatttttagtagagacaggatttcatcattttggccaggctggtctcaaactcctgacctcaggtgatctgcctgcctcggactcccaaagtgccaggattacaggcatgagccaccatacccagcctaaaaatataatttttaaaagctatacaggtttatgcataagaaaaaatgggcataaacttttagcagcaagtatatttgggagggggaaatacaaatattcaaagaaaaaacaaactttttctagttttcttcagggaatgtatattacttgcatcaccactaaaaaacttaaaacatgagtgtttctaaatttataggcgcgagccaccgtgcccggcctacaatgtgaatatacttaacattactgaactgtatgcttaaaaacggttaagacactaagctttatgtggtttttaccacaatgaaatataagaatttttaaatgagttcttctaaatttaaaaatgtaaacatgaagaggagtctctaaactgttagacatatcacgaactgggtaggaacaggagggaagttctatattaacctcagggttgcacaggccttaaaaacgtgagaggggattgctttagattaagagacttaagagattaaacaaccaaatgcaatctgtggaccacatttagatccagattgaaacaagccaactgtcaaaggacatcttggagataatcagggaagtctggttatcgtgtgagtaaaaccctttgtctgaggtgatttaaaaatttcctttttaagtagaggtactgaagtttaaaaaacataaatgagtccattaaaaatatgtcaagtaaataacagttcaagcagaatacagatttagcaaaaactgcaacgggagaagtgaaataaaagactgatcaggctatgagccttctgaccatgaggaaagaagcagatttcatgagagtgaatgaggtagaaactaccttaaagacatgatagggttttcctggaggtgaagggagaaaaattatggaagatatagaaaggaagtggttcctgaaaaggatgggagcttattgaaaaggcacaggagccgactgaaagagctcccaatggccaaagctgtagccatttgaacaacaaaataaatgacagtactgaattacagcctgtagaatacatatccacgaatccaatctgatataaaggagggcaatcctccctcacgatgagtatcactgaaaaaggcaaaatctattagctactttcctatgcaacaaaaatattctttgtaagcttttcacctgtgtgacgtgaggaatcccctcttcgaaaaattgcaactttttttttttttttaccacactttgatgaatgttcaagttgttaacaaggtggggctagtgaaaggccttctcacactcacaacactctaggaggaagccaataatgttgagaaaagtgtgtgctgtgactaaaggtttctcaacagtgatcgcactcaacagttttctcttgagaatggagttgataatgttgagtgaggtatgagggtcggccgaaacatttcccacatagctgacactggtaaggcctctcttgagtgtgagttctataatgctgaatgagatatgaattccgactgaagactctgccacagtcacaacactggcaggctctctctccaacgtagtcatgtttccgctgataacgaattaagtatgtcttgctgtgggacaacccaggaggaaggactcttgctgcctcatgggctttgagatgttgaagaagatgcacattctggagaaaagctttgccgcactgaaaacattcaaagtagtcctcctgactgtgaattcttacacgttcacagagattcgcacactggacggaaggctttctaccttcattgcagccagaagtcttcctaccagaatgggtcttctgatgtctgttgaggtgtggcatgagatagaaggcttcagcacactgtttacattcatagggtttcttcccagtatggatccgttcgtgtctcctaagggctacttgcgtactaaaggttcgtttgcaaaattcacatctgttgtgtttgttctcttgggatgctgactggggactcgtacatattccaggagcagtgccttcctggggatcctttcctagaggatcctttgattgtttactaagattagagcttctctcaaattcatcactgccatagcttctttccggagtgagggtcttggggtcattcattgttataggagtcaaaagtttctcttggttgccctggtgtggttccaatggatcatcatgagactctcctgcagagacaatgccagaagttacctaccgcccaattatccaatcctgccccccaataatgatatttctataggcaggctttgccctggagttagtgctttggtttcaggtctcttttcctaatctgaaaaaaaaaaagtaaaaattcctctattctttttactcagagagacataccaatataatagaaataaagagaccaaggataacaaacagatcttatggaggttgagagagttttctgaaaacctaaagagaaaatggaaaaaggatagaaaggacagtaagtggccgggcacagtggctcatacctgtaatcccagcaccttgggaggccgagatgggcggatcacaaggtcaagagattgagatcattctggccaacatggtgaaaccctgtctctactaaaaatacaaaaaattaactgggcatggtggcgcgtgcctgtagtcccaactactcaggaggatgaggcaggagaatcgcttgaacccgggaggtggaggttgcagtgagcagagatcgcaccactgcactgcagcctggatgacagagtgagactctgtctcaaaaaaaaaaaaaaaaaaaaaaggaaaagacagtaagcaaggaagagtgaggaagaaacagaaaaaatatcatctaggaggatggcgtgtcaaaaagatgccacaattgtacagagtagaatgagcagaaatcagagaaagagctggggttggggtttgtcagcattttccaaaccatgtttggcagatcgctaatattctgaaaaacaaatagctgttaccatgaagggggctccactgtcaagttaatttgggaaatgttgtatgacacaaatcaagcaggtttcattcctgtaggattcagaacttttaatatgcaccttgaaccctaaagagggaaggtacagaatgtggcatttcttaaagtgatcttgctatgaaacattttttttagaacatctattactatggttcttcaggactactgaggaaacactggagcaaacaggtcaacaacctcttgttcagaattaaacaaagattctcctttcttagctctgaatctcttgttttaccccaatctacactgtcaaccaatcctctttaattcaatatttattaaatgcctgttttgtgcaaggcattatctaaccagatgggtcagaggtctgtaaaagggactctaatcagactgtaagtgacgacaggagcagagatgggggaactgactccacttaggaacagaaaatgattagtggaggggacagcatttggcgtcagtaaacggggaaggggggcgagtttatataaaacagcctgagttaagctatagaactgtgaaaatatacagtcctggggagctagaaacacaggatcttagttgcaagatctgtagatgaggctgggatgcaaatttcaggccagaatgggaggaacttcagtgttttgctaaaagtttgaattttatcttgacggaggtaagaagctgataaaaagtctgtgctttataaaggcaactctctggttggaaaaatactgaagccaaggaagtcaagtataagactgtggtttggaagagaggtgatgaacacagtggttgcatcctggcagacacttgaagtatgtgaacagagtacaggtaaaacagcagagccagaacatggcttaggaagtcatcaggaaaagagggatagctgggcccatcacaatggattgactcttttaggaagtggtctttgaagagaacactcaagaacggaagagtaagagaacacctagtcctcactggctcttctgttttccttaccctgctgtatatccaatatttcagcatgttctgtcagttcttctttcagggaatacctccaacctgacccctctacaaccacggcctcagcctccatcatctttagcctggtggacttcaatggcctcttgaactggtttctctggcttttcctcttaaagcccgttctccataggacagccagatggatctttctagaatagcactgcccagtagaactcccagtgatgatggaaatggtctacatttttgctgtccagcacagtagccattagccacatgttgctatcaaatacttgcaatgtggcttgtgtgactgaggaactaaattttaaattttatgtaattcttactagtgtaaatgtaagtagccacatgtgcctactgtctagcatattggacagcaaagttctaaaatatcaataacactacttcatgcccctgctcaaaacctccccccatctttgcatctcacttataataaaattctttaacatattcctaagcgggctggcccttgactatctctgtgatctcatcttctatcttccacttaactcagaccatattgcccttcctactgtttttggaacacccaagctcattccaatctcagggccctggcacttgctgttcgctctgcctgtaacactcttcctcaagatttctacattggtcagccccccatctcattcaagtcttccacagtgaggccttctctgactattccatctcaagcaacctcccatatctcattctctatccactttacgctccgttattatttgtctattttttaaaactactgcccccattagaatgcaagctctatgaaggaagagatttgtctgtcttattcattattgtatccacagatactaggacagtatctggcccaccacagaagcctgataaatatctatgagatgactgaataatgaagaaaccagagtagggaaagaaaagaagacaatgaaagaaacagagaggagtcttcctggtaacttcttgaattttgtttggacatccacttttccactcacacagacaaacgtggaggagggctgtgtcaatcagcactgtactggacacagctgctagttcaggaaagggatataacccgatatggaacaatgaaaaatcaggagagctggaaaagatgcttcctctctcttgagaatgcttcttggacacaccagctctttcttgctccttttttgtacaggaacaaaaaaatgcatctaggatttattgtcagagtcgaaggcagagtagaaggagaaaatgaaactaggtcttcgatgacttcactgggtccctgaatacagcccagctgatcagtattataggctaataatccctctatgactttagccagtttgggtgtgggttttctgttaactacaactgaaggacaacagtgatccagccgctgcacatggtgacccatttcatgaagatggtaagcgttattagactgtagccatagagtttggaggaggtgaagtctatggttccagaactataaggacgctagtgggaaccttttgtggaagtttcagaaaagagcgtatatgtgtgtctgagttggcataagtagggggatggaaaccagagggtggggattaagaagaaaagggaagggagcgtctaggtgtcaacaagtctgaggagctgatgtgagggaaagtgggagggcagtgagaaagacaagtggtatcaggccaggattttttgtttgtctcagttaaagaggagagatgtatgatgtttagctgcaaggagaaaggcatgagtggacggaagggctggaacacgagggtgaaaggacactggcctccctggagctaagcaggagaggagctcatgctgcatgaagagatgggcttcagaaaggagaccaaggggagtactgaggagaaagggcacctaccagacttctcctggcccaggggactttgaggaaagctctctgactagcatttactggttccccctcctacaccccgggcttccccctcactactcaccttgacaaatcactgtatgtctgctgtctgtctccattgcatatgattcctcctcttccaggcgtgagataatgtcaggtttagagaactggtgccctgttggagaggaagactgagaactcagggtttcagtaactcccaaccttaggtcccaaagactctggaataataaggaaggaacaaactctcgcaggagtaaaatgaagcctgtttccagcctacagagattttaccccctaagggacatctaaaatgtatggagatatctttggttgtcataactgtgggagcagagggaggggttcctagtgtctagtatggctggaggcagggacactgctcaacattctgcaagacagccccacaacccgggacgatctggttccatgtcaagagtgccaaggttgaacaaccctgctatgaagactaaaaagggggcatgagggcagtgtgctgagctctacacttcagcaccaagaatctgacatagctgctcaaaaagtcaacattatggttcttttccctcctgggataacgtccactgcccctttgtcttgaagtgctgctcctccccctcccttagttccttgtttcccaaacttttatcatttgcataccaaattattatctatttgtttactgtctgactccactgaaatgtaacatccatgagaaggggaaatgtcatctattttgtaaccaaaatgcctataccaggccttgtatgtctgaattcactgacgagttaatgaatgacccttgcattttggcatttctacgtgccatttatagtcatattcagtatttatttaatgtttttctttagatcacctttctttttaacttagatatgcttattttcttttttctttttttttttttttgagacagagtctcactctgtctcccaggctagagtgcagtggcacgatcttggcttactgcagcctctgcctcccagatgcaagtgattcttctgcctcagcctcctgagtagctgggaatacaggcgcccgccaccatacccagctaatttttcgtagttttagtagagacggggtttcaccatgttggccaggctggtctcaaactcctgacctcaaatgaaccacctgcctcagcctcccaaagtgttgggattacaggcgtgagccactgcgcctggccaatacgcttattttcaatggaagctttatatcaaccctataaatggaaaccaatgtcactcacacacacacacaaaaatggaaggtaacatcatgataaatataacagaaactaaggttattgagtgctagctagcttctgttgcctatctaacattcagggtttgatgtctgctctcactttactaaaatggaagaataacaagatagacatgctaacaccaaactgatattctctacgtgataccatcagaaggcttaaaggaaaattgaagaacttctttttcaccaacagattgaaggattatgtcatgctgtccatgtactgcctaaaataatcttctatttagcccactgtactcattccacacttaggaagacaatgtcccaggtgatatataagatctctattaacacaaaaccttcagtgttaaagaagccaagggctcacaagatagaaatgctccaggtcactgcatgagagctggaatgatacaattaatttatttcctctattttgatactattccctctattttaagtcataaaatgtggtaagctagagaagagtgtaaaatatgctggaaaatgtacttccttgtaaccgataagaaccagagttaaacatatgcatccctgtgctaggtttggggtaggatgtgtgttttcccactaggtccctgacttgccagtggaacagtgtttgttttggattctgtttttcaggagacctcaagcccccaaaaaagccactgaaaaaggagcttggcactggcaacgtaaacttttcacttttcactttcaactttacctgtgagaacaggtaaaacaattttgcctccgcacgtaaagagagattggcaatctctgtttcttcaaactcaagccagtagaagtctttggagctcctggaatttttagcaattccttcgctcattcagtaaacatcattttgagccttccattgtgctgagaactggtggagcaaacccctgtctggtagcacatcagagtttaaaagagcagattctggagtctgcttggggttaaatcccagctttcgacaagtactttagcctttcaatgactcaggttcctcaaagttaaaaatgtcaataataacaacaacaataagtatacctccccctcacaggcctagtgtgaggattaaaggagttgaaatatgctaaacacttacacaagtgcctgacacatatgtcgtgctcaagaaatgttagctatgttataattaacagtgaatttgatattcaaatattaaaatattgcctctgacctgggttgagactcactgacatggtgaaccaccattactgatgagaggacacgaaggagttgagagctactgccctagtgggaagaaaccaagtcctgtggagaaggcatacttacccagggagaccaggttccggtaattctccagcatcacctccctgtagaggtttctctgagcagcactaagggaactaagttcctctgggctgaagtccacaagcacatcctcgaaggtcaccaactcctcaaacaccagaaatgttcctaagtgtttgaagtccgggaactatcccagagagaggagaagggacgtgattagagaggactgaacatgatgcaggcattcagaccagcagagagcttccacgtgctctaatccagagccacaggcacctggcattgcatctttctttgtcttatcgagtctgagagaagtgggaacattactgaaacagttcctattgctaattactacagatttgggttgagggggaaatatccttttaagccactttataaagacagaatgcaagcatgcaaatacttaaaagctcagcagtatacctcagcctcaggaatcagagtcctggctctggttctttgtgagtttgggtaggttaagcctcagggtcccacctgtaaaacaaagtgctcataacatgaagaaatattcaatcttgttaataaacaaggagatgaaaatcaaaatgacaaaataccattttatacccattcaattaagtattgggtaaaaattaagtaattgagtgaaaattaagaagtgggacaataccaactattatataaaacatggatccactggcgatgctaagggaaatgtaaattagaaaatcacttttgatccagaaattctttttttaatttttaaaaatttttgtgggtacatagtacttgtatatacttacggggtacatgagatgctttgatacaggcaggcaatgtggaataagcacatcgtggggaatggggtatccatccccttaggcatttatcctttgagttacaaaggataataaagagttacactctttattttaaaatgtacaattaagttattattgactatagactccctattgtgctatcaatagtaggtcttattcattctttctactttttttttgtacttgctaaccatctccacctccctccagccccccaactacccttcccagcctctgagaaccacccttctaatctctatttgaccccaaaattctattcctaggtatatttactcatgtgtacttaaagacatggatgggcatgtttattatagcatgtttggaacatccaaaatctggaaataacccaaacattcattaacagtagaagagataaatatagtatagccatacaatgaaatagtattctagcaatagaaatcaattaactacagttatatacaacaatcttagtagcctaaggttgaatttaaaaggcagataccatatacccaaaggaaaataagctgtcctaccaaaaagacacatgcactcatatgttcatcacagcactgttcacagaagcaaagacatggaatcaacccaagtgcccatctacagtgaactggataaagaaaatgaggtgtgtatacaccattgaatactatgcagccaaaaaaagaacaaaatcgtgtcctctgcagcaaccggaatgcaaccggaaacctcagatgcaacgggaaaccattatcctaagcgaactaacgcagaaacagaaaaccaaataccacgtgttctcacttattagtgggagctaaacactgggtatacatggtcattaaaatgggacaacagacactagggaatacaagaggaggcagggagggaggagaataaggattggaaaaggccatttattgggtactatgcttactatctgaggtgacatactcattcatgctccaaatcttagcattgtgcaatacacctttgtaacaaacctgcacatgtgtgccctgattctaaaataaaagtgaaaaaaaaagatagactgacctcttcaaatctaacattatcctgaggcaataggatacttaccttccttagcaaatctgaatatagaaaattgtaacacgtgtaagaaaatgcataggatctccccactcaaatatgctaatccaataagtctttataaacagttaatgacaaaaattgaaaattaaaacttactagccattttgctcaaaatgttgtagcagttaatgatttttctgtctgtttccagtcatactttggcaataaaaaaaatgattcaaaaccaaaggtacattgttgttaggctgaggtcttaacctggcaatcacagattcttaaggctgagctttgtagtgcatgtgcacctttctggaagataaaaattccgtttctcaaaggagtctgtgactcaaaatatttagcatagagagcaatctcagtttttcataaccttttttcttgtgctttattttacttaatacagttaatatgctacaataccttgaatataatggataatcaatattattatattaaaaaaagattgttaaaagagaaatgttacctgattcagtataagaaaattgaatttagttgtagaaaaggtatctatttcaagtaagaatcactgtatggtaggtcatgatttctcagtcacagtgtcatatttaaacgatggtggtcatgtggtagtcagagcatttttaagactgctatcttactgttcccaaatgttttcctactgttaactgtccattgaccctcctttcttttttccatctcatactctgtaactattagagaaaatcatgggaacaaacctacactggaataaggagttttgagttctgctattagctagttgtaaggcatgggttaattaatctctttgattctcattgtctcatctttaaaataaagagatccattacattatctctaaagtcatttacactctaaaattttataataaaacacataagatcccttgatactataaaaataaaaaggcagataccagaacattacataagactctgatatccattttattaatatacatcttttgtgttttaagtgaaactttctaaaactttttatgcaaatcaacaaacactggattaaattagggatcatatactggctgcccagctccttcagatgggtttatttggctcacgtggtcctattgttttttaaaaatttgtattagctgccaataccaaaaaaaaaaattaggaaatgtcattcttaactggttttgtggcttctgattaaaagcattagaaaatctggggactgggtccacattctcacatggcaccatcagcaaaagctgagtcacagctgcccctatatatgggacaggcactccccctgtttctcataatccacccagaccaattccttatttatattcccttggtagtccctccagggcatctttgcttggaatccctggcacagacaaggtagggacagagggctactctcaggagcagatattctagaacagtgtttctcaaccttttttccttacctcgctccccccaccccagtaatctttatacgtcattttttctaatcacaacccccatgaatttttttctggttctaaagaaagcagagtatattaatttcattattgtcttttaggtttctaaaacatgacttaacaagaacactggagaacatttttgaaacaaaaaatcagaaaacctcataacagtatcatgtccctataagagctgccatttgttaaaggcctacaataagccacaccctttgtgtgggtagaaggggttgtcttcatttacactattttcattgttgcaaagtacattccagcccttgacatggatatactttttcaaacaattataaattagcattgattcacatacacaggtattggatggttccaattttaatgtgcacacaaatcacctggggatcttgttaaacacagattctaattcagttggtggaagtggggccacagatgctgtatgtctatttttttaaataacagctttattgagatttaatttacgtattataaaagtcacctaaagtatacaatttaatgagtttttaagcatattcacagagttgtgcaaccatcaccccaataaatttcagaacatttcatcgccccaaaagaaaccctgcaccttctagcagtcactctccatttccctccaacatcttcccacgccctaccccaagccctaggcaaccactaacatactttatgtctccatggatttgctgattctggatatttcataaaaatggaatcgcacggtaccccatacattttaatatcgcaaatatactgtgtatgtactgtatgtatgtctgtgctgtacacataagaagaatagtatgtgttcaccctcaagaaccaattttcttccccttgaaggcaatatcctccttaagaatgcgtgttccaggacatgactttcaaggaaaaggcccttttcaattgctctgtgactttttggcacccccatatggttctaagaacacttttttccctcaaacagagcctgacaccggtagacgttggtgaataaacaaacagatgatgacactaccagaatcatttgtataatcttgtacaacctgaaaaaagttttatgtttgatgatttcattaaactattattcattattttggaggaaatacatggtaggacataactacctttcctttttttaaaattctggactattctagcctatccatgcttcccagtggaccccattgtctcaaatccccaaatccaaaaatttagttgaaataggacggccagataaaattcagcatgcccagttaaatttgaatttcactaagttttaaggggctgagtttttttaaatctttgacaatttcattcatggatagtgtgttgggtgggaagagcactgggctggcagttcagagacctgggttcaagtactgtactgttttattgttttttgttttgttttgtttttcttgtttgttttttgagatagagtctcactctgttgcccaggctggagtgcagtggtgcaatctcagctccctgcaacctccacctcctgggttcaagcaattctcgtgcctcagcctcccaagtagctgggattacaggtgtgtgtcaccacgcccagctaatttttgtatttttagtagagatgcggtttcgcatgttggccaggctcgtcttcaactcctgacctaaggtgatccgcctgccttggcctcccaaagtgctggggttacaggtatgagccactgcacccggtctgtactgttatttaatttcattggacaagacaggtaacatctctgatctggaccttgatctataaatggtcattgtactttttgtatcatagggttttgtgaagaacaaattttgttatgtgtctattaaaaatcttttttggttttgtttttgttttttgagatggagtctcactctcactcaggctggagtgcagcgacatgatcttggctcactgcaacctctgcctcccaggttcaagtgagtctcccacctcagcctcccaagtagctgggattacaggcatgtgccaccacgcccagctaatttttgtatttttagtagagacggggtttcaccatgttggtcaggctggtctcgaactcctgacctcaggtgatcctcccaccttgggagggatattggcctgaaattttctttttttgttgtctctgccaggttttgctatcaggatgatgctggcctcataaaatgagcctctttttctattgtttggaatagtttcagaaggaatggtacaagctcctctttgtacctctggtagaattcggctgtcaatctgtctggtcctgggtttttttttttttttttttggttggtaggctattaattactgcctcaatttcagaacttgttattggtctattcagggattcgacttcttcctggtttagtcttgggagggtgtatgtgtccaggaatttatccatttcttctagattttctagtttatttgtgtagaggtgtttatagtattctctcatggtagtttgtatttctgtgggatcagtgatgatatcattttttattgtgtctttttgattttttattgtgtctatttgattcttctctcttttctcctttattagtctggtaagcagtctatctgttttgctgatcttttcaaaaaaccagctcctggagtcattgattttttttgaagggtttttttttttgtctgtatctccttcagttctgctctgatcttagttatttcttgtcttctgttaacttttgaatttgtttgctcttgcttctctagttattttaattgtgatgttagggtgtcaattttagatctttcctgctttctcctgtgggcatttagtgctataaatttccctgtaaacactgctttagctgtgtcccagagattctggtacgttgtgtctttgttctcattggtttcaaagaatttatttatttctgccttaatttcgttatttactgagtcattcgggagcaggttgttcagtttccatataatcgtgcggttttgagtgagtttcttaatcctgagttctaaattcttttccttaagaatgttgatattgacctccactctcttctggcttgtagggtttctgcagagagatctgctgttagtctgatgggcttccctttgtgggtaacccgacctttctctctgactgcacttaacattttttccttcattttaaccttggtgaatctgatgattatatgtgtcttggagttgctcttctcaaggagtatttttgtggtggtctctgtatttcctgaatttgcatgttggcctgtcttgctaggttggggaagttctcctggataatatcctgaagagtgttttccaacttgttttattctccccgtcactttcaggtacaccaatcaaacgtaggttttggtcttttcacatagtcccatatttcttggaggctttgttcatttcttttcattcttttctctctaatcttgttttcatgctttatttcattaaattgatctccagtctctgatatcctttcttctgcttgatcgattcgctattgatacttatgtatgcttcatgaagttctcatgctgtgtttttcagctccatcaggtcatttatgttcgtctctaaactggttattctagttagcaattcctctaaccttttttcaaggttcttagcttccttgcattgggttaaaacatgctcctttagcttggaggagtttggataaacaacagttttttacataagtatgtcttaaatatgaaacattgcatccttatgcaaaaaattgtctatctgaaattcaaacttcatagttatgctaaaaatttatttatacttatgctaaaaatttatttgtagttcatctaaaattcaaatttaatttggatgttgtgtatatttacttgctaaatccggccagccgaagttgcagtaactgcactaccttaggcagcaataactaagtggttatgaatgtggactctaaagccagactgcctgggttcatatctcaatcgtattatttaacagctgtgttacccttcagcatattatttagtctttctgcctccactccctcatatataaaaaggggaacaataataatgcaaaccacacaagggtttttctgaataaaatagaatactaaaaaaataagtaaacaattaattcaaaagacagaaaaaaaggaaaaatattaaatatatagtatgtgggatggtgataagtacaacagagaaaagtaaagcacggaaggaggataaaagagtcagaaggatttttcttggagaaataagaaaaaaaagaatcataagcaaatgtcagattagtcagaaaaaaggctcagtaaagtgatatttatataaaaacttaatggaaatgagtatgtggtttaattaaataaggaagtccacaaattaggaagataagatccccatatttgataaccatgtcagaggaaagcctgactcacctgggacccagcagatggcagattgtctaacatctctgtgttcctcttttctgcagggacagagtcctgagcaaggaaacctagaagggagagaggaataccatggaattgagtcctgtctggtagcactgacagacacagtggccagccaccctcatgccaccctgtcctgccatgggaaggaacagcagctctagagttcctatggtgagaaagtcagatatcatttctcaactcaaaataacaagttccaaaagagagctctggttatttcccagctctaaatgcttcaatggctcccactgccttccaaataaagtgaaagttccctccatatcagtcatttcgggcctcactgtccagtcaagatcaccacagaacctctgtttctcaactgtaaagcagaaataatgacaatacctatacagtagtccccacttatctgaggttttgttttctgcagtttcagttacccatggtcaattgggggtcaaaaatatttaatggaaaattccagaaataaataattcatatgttataaattgtgtgccattctggtgatgaaatctcacactttcctgctctgtcccacctgggacatgaatcatccctttgtccagtgtatccactctgtatacactaccccttagtcacttattagctgtcttggtcatcagatcaactatcacggtatcacagtgcttgtgttcatgtagaccttattttacttaataatgcccccaaagcacatgagtagtgatgctaacctactgttataattgttccattttataactagttgttaatatcgtactgtgcctaattaataaacttcgtcacagatatgtatgtagaggaaaagacatagtatatatagggtttgataatatccacactttcaagtgtgttagaatgtatgcccctcagataaggggagtatactatacctctaagggctcttgtgagaattaaacattacatatgtaaggcacacagtaggtatttttttggtaaatggcagctcttatgattaagcctttcctacatatttttcactcgttgatctaaaagacaaccacccctttccctccaggagccttaaccttgatggccttccttgcctatatattctcttttctcggtaaacccttcattaatctgttttttctttctggtaccctagggaactctctttccttctcactgaactctagcttcatcaataactcagtgcctctggccaagtttttagcctctgggacaacatccactatatccatatgaggcactcatgtaacacggtgattaagagtacagatgctgaagccagcagcctaagtctgaatcctgactgccaattattaatataagttgtggaaccatggtcaagttactcaacctctttatgcctctgtctcctggtctacgaaatgaaggtaatacctatttcacagagctattaatagaagaaaatgaattaacatgaaagaacacctatgataatacattaaaacattctaagtgctcaagtgttcactattagcattttaaaaattcttttaagtaatgtgggagcacagaatgggattaatcataatccttagttcatgatatgctatctttattgagccatgcatggctctcatggttattttaaattcatttgtttatatttttaagtataattaaggcctgtgaatgtactatccaacccaaaagtataacattcccaataacttacatctgcctgtgtgcttctttcatgtccatactcgagccttccctctagagataagtatgccctgaggtctggtgttagtattcattgttcccttgctatatatatgccccaaacaatactttgcttttagttagtattatttgtttcaaagcactataaggacccagtggctttcttctctcattcttgaaatgcctccttagctctaatctaataacttgagtttctaagataccagtcaaattttggcagaagttgaacttccagtctttgtatctcccacattttatgcccccttgcatctaaaatttagctaatcattcttgttcttgaatagaaagactaaataatgtaaagaccaattttcccaaatttacacttaatatattaatgccacaagcaatcccaggagttttttttttttttttgtagtgtgtctgtcttgttttatgttgcaactaaggtttacactggataagaaatgtgaggcaaggtgaacaaagctgatacactcagagaaatagtatatgttaaaagcaaaagccaaacccacataggcataaaaaggaatgaaatcatgtcctctgcagcaacatgggtgcagctgaagccattaacctaagcaaattaacacagaatctgcggtggctcttgtctataattccagcattttgggaggctgaggtgatccacccggatcacaaggtcaggagttcgagaccagccctaccaacatggtgaaaccccgtctttactaaaaatacaaaaattagccaggcgtggtggtgggcccctggaattctagctactcgggaggctgaggcaggagaattgcttgaacccgggaggtggaggttgcagtgagctgagatcatgccactgcactctaccctgggcgacagagcaagactctgtctcaaaaaaaaaaaaaaaaaaaaaaaaaaagagaaaaccaaatactacatgtttccgcctttaagtgggagctaaacactgggtatacatggactctaagacgggaacaataaacacggaaaattccaaaagggggtaatgaggaaggagggcaaaggttgaaaaactgcctatccagtactatgttcactacttgggtgacagaatcattagaagcccaaacttcagcagcatccaatatacccatgtaataaacttgcaaatgcacccctgaacttaaaataaaaattttaaaataacccaaacaccaaatttctttcatctcacatgagattaggcagatcagactgaatgtataaaatgcattctttcattcattcactcaacaaaatttctatttagctcctattacgtgccaggcatacagcagatattcaataaacagaagcagccagttgcttcctccttctcaccttccttctcacatgcctgaataaagtttgccaccatggttcctgcctctttgctgttcttgggctgttttgacctcacccatgtctgaatctcctctggcagggtgctcagaaactgtgtcagcactagttgctctatcatctgctccttggtgaggatctctggctgcagccattgcaaacagagctcctggatttggctcacagcttgatgaggcccattcactgacaggtactgaaaatccccaaacttttgatgagaaactttcagtgtctctgtttctagtttcttctcttgaccacacacacaaaagatgtagggattcctcaagatatctgaaacccctgtcacatccagcatctctacaccttggccctttacaggacagagctactcttaaaggcaggctgctccagtacacaatgttgtggaagacggtaggcagggctgtatcagctgaaaggatacagaaacctcaggacctgcagaaattacatacagacttacaactagcctgcatagttatgattggacagtggagtgaaggtgatctgaacaagtattacacaaaagatgacagctataaatagccaatcaacataaaacaaggctaaacttcattagttatcagagatataggaattaaaaccccaataggataacactatgcaccctccaaaatgtccaaaatgaaaaagtcagacaataccaagtgttgacaaggataatagagccacagtaggatgatatatttgtatattggaatgctaaacagaaaatatgaatgttaagttgctgttgaatgaaagaaaccaggctcaaaaaaaaaaggtctgtattatatgattccatttatataaaggtcaaaaacaggcaaaataaacctaaagtgtttgaagtcagaatagtggctgctgttggggggaagggtggtaatgactggaaccaggcattagggcttctggaaagctaggaatgatgtggacacagtgtattcactttctgaaaactgagctacacatttgtggtttgtgcccttttccatatgtatattttgctaaacatttattagctgtattatagttgtaggaaaacatctagtcataatatcaagcggaaaaaggaaacctgtacataacaatatatgcttacccatataaagcagagaaaaggtggtaaaccaaaatactgtgccagtgggttaagtacgaacggtaatattataagtgatttttataggtgattttgtactttctctcaaaactattttctagcttcaagatgttctacaacaaaccttcatttcttctgtaatcacagaaataaaacataccttccataaaggctacactcactctaagaaaccatgaacaaagatgccacttggggaaaacatttttttcttttcttatccccactaaaacttacgccttttatttctataatttaacagtttttccatttgaaagcatttatttttgttttccattagaaatcataacgtaatgaacatcactgaaactaagtatttgctcccaaattacatagacaaaagggataaactgtttttaaaagttcttgacacaatctgccaaattttcctttcaacggctaccaacttcttcttccaaactcaatgtataagattacatgtctcactcagtccaccttacaagccaatagtgccatcttcatgggcttgtaatcagggcagtcacaagagccccattctcataaagcccacaggcctagtttaatgctttactgtcactctcttgaaatttttcacaattttttggacaaggagccccacattttcattttgccctaggccctgcaaattatgtaactggttctgccaatcaagagcattatcatccctcaaaatctgttgtcaattagacagattgaaaaatatatcattttattctttaattttacatttcttttgattaataatacggctttctctttgtttcagatttacaagccaattataaattgttcacgccctttgtgcttctttacattggggtgtttcttttttttcttttcttttttttctttttttgaggcagagtctcgctcagtcgcccaggctggagtgcagtggcgcaatcttggctcactgcaacccctgcctcctgggctcaagtgattctcaagcctcagcctccggccttggggtgggctccaggcccaccagcgcagagccgtcctgggtccctccctgcaggggcaccgattttagggcagtcagacgcagccctcgcctctggggtggcttttccaccacaaggccccagtagggcccgccgcggagtcttcctcacgaagccgcgcgctgccccgcgctggatgcctcttgcgccctcaagtccactggggccccagccccgcccaggcccctggctgggctacccgctcgccggccgctatcctaccccgggcccagcgaacttacctcgcacgcctcacgccctggcctggctgaacgtctccacgccctgaccaaaaccagcagcgcatgcgccgtggctggcttgcgcgtgcgctctgcggtggacgggctgaggaaccacagccgctcctggccaagtgccctgtgagacacgaggatagggttggtacggcgaggagaagggcggcgacgtaggagggcgctcctgtgaccttccttcttaaaactaacgccttctgttggtggtgggcgcctgtaaccccagctactcgagaggctgaggcaggagaattgcttgaacctgggaggcagaggttacagtgagccgagatcgcgccactgcactccagcctgggcgacagagcgagactccacctcaaaaaaacaaaaacaaaacaaaacaacaaaaaaactaatgccttatgtaagttttggagagttaatatgttacttagaacttgaggataagtggtaaaaataaaaaataacaaactaatttcaaaaatttgaaaataagcggtagtcagtgaaaacccttcctcacaccacgtgtgcaccattcaccaaaattttacccccaaaacatacgtaaccactgtaactgatctgaagtgccccaccaatgtttctttatacttgtagaagaaatgtatatgtatatgtgtgtaaggcttccctcagtattcctgggggatttgttttaggaccccccagggtatcaaattttgtggacgctgaagcctcatgtaaaatggcatagtatttgcatataatctatgcacatgcttaggcatactttaaatcatctctagattacttacattacctagtacagtacctacacatcattcttgcggatttgacagtacgcagcacacatggcaaatttaagttgtggtttttggaacttggtggaattttcttccaaatttttctttttctttttttttaactttgttagagatgatgtctcactctgtcacccaggctagagtgacagaacagtggcatccccgaagctggatgccactgctgcaggttggctccactcatgcccgaacctctaagctggaggctgatccccgctggagagcgggtcagtcctctaggcccagaaatgaccaagcaaagcttaccctctggctgctcacccatggacaactggggtgagcttgctcagtgagtccactaaaggtcccccaggcagtggggggtggggaggctgaccatatgcccagaatgagtgggacaaagagcaggcaaatgaaagcgttgccagaaaagggtcttgatccaaaccccaaaagagggttcttggatctcacacaggaaggaattcaaggcaagtcacagagcatggtgaaaaaggcaagtttattagaagctattccattacagagtagggtgtcgtcagaaagcaagcagacaaacacaccatctttgttttaagtttttaggggtcttgtctacgtaaagactaaactaagctgtgactacgtgagggtgagctgaaagcatgacaaaatttattattctattgatttaaagaggccaggcacggtggctcagccaggcttggtggttcacacctgtaatcccagcactttgggaggctgaggcaggcagatgacctgaggtcaagagtttgagaccagcctaatcaacatggtgagaccccctctctactaaaaatatttttaaaaaatagctgggtgtggtggtgcacacttgtagtcctagctactcaggaggctgaggcatgagaatggcttgaactcgtgaagtgcagtgagctgcccactgcactccagcctgggcaacagagtgagactatgtctcaaataaataaataaacaaataaataaataaataagctgtgactatgtgagggtgagctgaaagcatgacaaaatttattattatattgatttaaagaaaaccatccttagaaaggtgagagaggaattgaagggttgacagtgtagactacagaaccaggaaatgacctaccagcaagtcttttatgtgtgtgtgttcttttctatttctttctgtttattcctgttagtgtttgttctcttatgcctgtgaaaacctcctacatgtcaatttccatgcactggaggaacttggatttctccccgtcttaaaagtacctctttcttcttctcctccttcttcccctcctcctcctcctcttcctcctccctgaggccctaaaaacaaggtggccttggctgctctaccaaaaggaggatgattcagaggctgtgagtttaagggaccacttttgggggattggaagaaatctccattatgaggttaaggtacctatgggagactacctgagacagggtgccagtgatgcccactagcctcaataagacaccagggatgcctgagtgcaatggccaatatcggttttgtgcacagtaaggaaaatttagagcttaaatggttaatctgctgctacagagttaagtagaatcctctaaagctccatatcttcctttcttttcttctctgccagctttgaatctgctgttattaagttgctggtgctgaaataacacttattatttatgatctaactgaaatgggaacactggaaacttctttgaaactgaagaaaaaaatgaaaaagaagtttttacaatcaaaactgccatgaagactgctttacccaaaattttggtccacagctttcattgaattacttatcagggcaaacaaagtttagccatgtgaacacgttccaattttgttggaaataatttggatccagctatctttatacaatggtgagttcgtattgcatctcatggctaaaatactgaggtaaaggcttttggatctttgtgtgtgtgtgtgtgcatgtgacaaaaacaagcaatggggaaaggagtccctatttaataaatggtgttgggagaactggctagccatatgcagaaagttgaaactggagcccctccttataccatatacaaaaatcaactcaagatgaattaaagacttaaatgtaaaaacccaaactataaaaaccctagaagaaaatctaggcaataccattcaggacatgggcacaggcaaatatttcatgacaaagatgccaaaagcagtagcaacaaaagcaaaaattgacaaatggaatctaattaaactaaagagcttctgtacagcaaagaaattatcatcagagtgaacagacagcttacagcatgggagaaaatttttgcagtatatccatctgacaaaggtctaatattcagcatctacaaggaacttaaacaaatttacaagaaaaaaaaacaacgccattaaaaaatgggcaaaggacgtggacagacacttctcaaaagaagaaatttatgtgggcaatgaacattttttttaaaaaagctcaacaccactgatcattagagaaatgcacatgaaaaccacaatgagataccatctcacaccagtcagaatggctattacttaaaggtcaaaaaacaacagatgatagcaaggttgtgaagaaaaatgaacacttttatacgttggttggagtataaattagttctacccttgtcgaagacagtgtggtgattcctcaaagacctaggggaagaaatatcatttgacccagcaatctcattactgggtatatacccagaggaatataaatcattctattataaagatacatgtgcatgttcattgcaaaatagcaaaaacatggaatcaacctaaatgctcatcaatgacagacttgataaaggaaatatggtacgtatacaccaaggaataccatgcagccataaaaaggaacaagataatgtcttttgcagggacctggatggaaccagaagccattatcctcagcaaattaatgcaggaacagaaaagcaaataccacatgttctcacttgtaagtggtagctgaatgatgagaacacatggacacatggtggggaacaatacacactggggcctgttgcagggtgcggagtgggagggagagcatcgggaagaatagctaatgcatgctgggcttaatacctaggggatggaatgatctgtgctgcaaaccactatggcacacatttacctatgtaacaaacctacacatcctgcacatgtacccctgaccttaaaataaaagttggaaataaaaaaaaccctaaacatatacctactacctgatccagtgatttcatttttaagtatttacccaagagaaataaaaacatatggccacacatgcaaaagaaatacttgtacatgaatgttcttagcagctatattcataatagccaaaaatctggaaacagcccaggtgtcaatcaatagtagaataaataaccaaagtatgctaggttcatgcgatggaatactacactcagcaaaaaaggaacaaactgcctatacatgcgataaaatggatgaatatagaaaaacatgctgagtgaaagaagagttacacaacgaatgcatgctgtgtcattccattcatgctaattctacaacaagcaaaactaatgtgtggtgaaaataaattggtggttgcccctaaggagacagagttggagactgattgatgaggagcaagagggaattttgggattgacaatattgttttgtatattaatagagatttgagttacacaggtgtacatattttccaaaactcattgaataatatccttaagatctgtatgttttgatgtatgtaaatttgacctcacaatagaaaaaaaagaatccttaaaaaaatgaaagaactaagtacatataaatgggaaaaatgcttgtagacagacttttcatgtaatttaaaatcttataattatcttgaataataaatactcattagatgttgggtgttttccaattaaaaatgggttataatatgaaaaaaacatgtttctaaaaattacagaatggtttcagctataaaatgctaacatctgataaacagttcaagatttattgcttcctgagttttcactaaaatttaaggttactaaaagtaagaattgcaataatatataactctgtaagttgtattcttattgagaaaacaataattttatgtagtttagaggttatttaaaagttatttatttaaaaaggtagaaaggaaccagtaagtaagagagagaaagagagaaaagatttttagacataaagatgtatttttggtaagaaaagaaataattttatataagaaaaggatttcatgtggtaaagttttgtcctaaaataaaatgaccgattattttaaaagaggtatgatagaacaaatcaaaaggtccaagcatgtcatagatggtctgtgtaagttcatgatcaagtctgtggaagaaaatttataaaaggaattttgtatatgattaagttggctataattaataagaaattattcataatagtctttctgagattggtcccctatgttaaaacaaggtttcttgatggtattactttttttttttttttttttgagacagagtcttgctcagtcacccaggctggagtgcagtggcacgatctcggctcactgcaacctccgcctcccaggttcaagcaattctctgcctcagcctcccgagtagctgggattacaggtgcccaccaccatgcccggctaatttttttgtgtttttagtagagacagggcattcatcatgttggccaggctggtcttgaactcctgacctcgtgatccacctgcctcgccctcccaaagtgctgggattacaggtgtgagccacctctcccggtctctttatggtattaatttactattaatgagattgtaagaggttttgatttttaattctataatctttgacctatagctcccttatcctcagtggcctctgcaggcaacacactccctccttaccaatccccttcagactctgctgagggactcagcccagccactacctggagcaggacatttaccagccttactctatgatgccccttccagcagatccccagtgcggaaatagagatgtttgctgtacattttcccttcacaacttcagagctttataacggaaagtctcattctaaaggactaagggaagatcctgaggggtttcaaaacctcattcagaatagtttcagacccatgacctcaactgggcagacgtccagtcccttttaatattctcctcagtgaaacagaaaaatacctctgctctcaaaagggcaagggaggaagtggaccaatcccatagagaagagacaaacaatcctattgtagctctcagagcacagcagacattagacataaactccaaaaagtaaaattagagctcgatgctctcatctcaagactagtagacctggccaataaggtgtccaacaaccgggatagggatgaagaacataaagaagacagagaggacaaatggcaagcccacctactggctgttgccctcaagtgccagctggataactcacaggatacctatccataaagtaccacagctgaagagagtgatcccaggtcccctaactaacagaaaggatcctaaagacctaagggactaggaccaaaccaacatgccctctataagggggaggatcactggaaaagggactgtctccttcatgtctgaagggagggggaagagggcaggttccaccaggtgcctcacagaggcagatggtccaagtagtaaaaatgacaggtcctggggactcctcaattggccctccaggtgtccatcccccaggagcccaggctgacactgggcatgaggaacaagcctgttgacttcttggtcaacacagggggccacctacttggttttgaataccctcaaggataaaattacccaccaaaattgactatggaaacgtgagggaaggcaaaagatagcccctttattgagctcctaaaatataaactagatcaaacgagatgcactaaaagggatggccccaatgattaaaaagcttagaaaacagggacttctgagggcctgtcaatccccttgcagtactcctatcctccgtgttaagaaatcaaatggaaaataccaattagtgtaagatttaaggacaattaatgaggtcacagaaaacagaaacccagggtacctaatccttatactctatggtccactctgcctccaagttgtacatggtactcagtcctggatctaaaagatgactttttctgcattccactggccacagactctcagcctctcttcactttcaaatggcaggatcctcagacaggcaggaaacagcaactgacatttactgtgttgacccaggtgttcaaaaaacttccccaaaatatctggagaggccctagccatgaagctggaggatctgaccatttcgaatggatgggagaatgtgaccaagcattccaaaagctaaaaacccagctcacgagagacccagaattagccctacctgatttaagcaaacctttccatgtttatgttcatgagaggggaagaattgccctaggaatacatattcaaaggttggacccactgacctgggtaatgatctacttttccaagcagctggactcagttgctaaaggatggccaccttgcctttggttggggatggccatggccaccctttcaaaagagacaaaaaagttaactgtctggactccccaccatacccagaccctcataaaagaaagggggcagaagggctgtccccaggcaaggctctccagttacaggtaatgcttattgatgacccccacataactttgaaggtgtgtaacagcttgaaccctgccaccctctttccatctgaagatggttacctatctcacaactgcttagaggtgatggtgaagtgtactccagtagcccagaccttaaaagtgaacctactgaaaatgtggaagtccaatggttcactggtaggagcagctatctgcaagaggaacagaggagggcagatgtgctatgttctctcccactgaagttatacaagccagcgctctcttgccaggatgctcttcacagaaagcagagcttgttgctctaacccaggcgttagagtttggggaagggaaagtcctcaccgtatacactgattccaggcacgtgtattccatcttacacccacatggggctatttggaaggaaaggggcaggttaaactcttaaacgttagtgccatcattttaagattattggaagctggaagaaaaccagcccacatggcaatagtccgttgctgaagccaccagaagtgggacattgaggtaattaaagaaaataataaagccaacctagggtcaaaacaggcagctttagggaaggtcacattccaaatgccacttttgcctttcctcctgggtcctgctcttttaaccccagttttctctcaaaaggaatggaaaaaggcgaccaaatggggttataccaaaaatcctgaccatccaggatggctaataaaccctcgtggacaatttcttttcctaaaaacagttgcactgcaggccattaaaaaggctcactctaacacccactttggtgaagaaatcctttataactgattttgtgaaagcatgactgtcccaaacttcagggagtcaatcaaaaaggtggctgggactcatcccacctactatgttaataacccctgatacccaccccacgtggggatagcaggggtgagaggaactcagagagggctcctcagctggtccagttccaaggtagatgtccaggggaagatgagaaagttttcatagttatgcccagaggcctgggaaactttaaatacctcctgatcttcactgacaccttttcagggtggatagaagcctttgccacctgcactgacactgcacatcaggtggcaaaggtgctattaaagaaagttgtcccaagaattgggctgcctcagtcaatccaactgagggaccagcattcatatcttccattactgaagctacttctcaaagcctagaaacaagatagcacccacatgctacctggagaccgcagtcttcaggtaagcaatgagtaggtgtagcgatttctgtcaagactattattcctacctaatggttatttcctcttctacatgcttgacgtactatgatctcatgtaaccctcacaaggtagcctctgttgttatttctccattttacagaagaggaaactgagacaagaaagcttcactaacttgtcccactcagtatgattagaatgggacaggcagagggttaggattagaagtgtgcatctaaccttcttcaagggtggaaatttccaatcagttatgttacaaacatttgtaaaataggcatgttccaagaatggtacaagtaatgcactcacttaaaccttatagtaaccccgtaacgggggtactaacaccagccccattttacagatgaggaaactgaggcacagaatagttaaggaaataacccaagattgacagctgttagtggcagaggcaatatttgtgaccaggcagttagaccccagagtctgggctttcagcttcaccaggctggcattttcagctgcgaggcatcagagtagactggagggttgggtctctgctctgtcccccttcctttgcagaaccatccttcctctgctccagggtttttcagccttggctctactgacattttgggtcggttcattctgtgtcctgggggtggggacactgtcgtgtgcattatagggtattgagcagcttccacctatgagatgctggtagcatcaccccttcagttgtgacaaccagaaatgtttccagacattgccacatgtcccctggagggcaaatcgttcaatcccatttgagaaccacagacttactccacaatttcattgtttaactttagggagagtctgggaccttccactgggaagggccaggcacgcaactcaggctgggccaataagagtcctacatcccccagttgtggattggttctgcagtagacatgtgacccatcatggaccaatcaaaatattccccaatccttccttacttgctttatctaagtgtctcccactgattgtttattagttgcaaggagggaaaccagaaagtattcagtgggtaaatcaggcaaccaccttgactgggtggatcaaaactagcatcaccagtgatggcatatggatctcttgtgggttaaaacgtgaggtcctgaaaggacacagaatcacttatgtggtattccaggaacgactgcataacctgaatctaattcataggaaaatggccccccaaaccccaaagtgtgtcagagtgtgacttagaaaccaaagaaaggctgaggaggttttccagattaaaggaggctactttacaactgctaaacacaggcctggtcctagccctagaaaggatactgtactggagaaaaaaagaatatttaaatggagggtatttagcaagttgataaaattggaatattgacagatttgataaaagcactgtgtcaatattaaatgtgcaaaggttataatagtacctcagttatgtaagagaaaattcttattcttaggtgacacagactgaagtattcagaggtgagctttgtgatgtgtgaaatctatgcccagtggttataaaaataatgtattaggtatatatataatagagtgtgcaaatgacaaaacaaataggagaaatgttaccaatcagtgaagatgggtgatctttgtactattcttgcaactttcccatgagctttaaattatttcccaatatttgtttgtttcattcctgtaatgaagagcccccaattaatagatgcttaaatatgacagatgtttatttctcatgtaaaagcctggataggtagtcaagaatcatcagacataagctcttatctcattactctgacatcttcaatacatggcttcccttttttgatccaagatggttgctccagttcctaccattatttctacattccagcctgtggggaagggggaggagagagtagaaggctggttgtgacctggaaatcacacatacctttactgtgctcatcccatggaccagacattagtcacatgcctacttctagctgcaagggaagctgagaaaatatttacttcttctaaatagccacataaccagtcaacatttagcaagaacaggagaatgtatattgggagatatattgttactgccttcctccccgtacatactgctgtggtctgaatgtttgtgtccccacaaaactcatatgttgatgttcaaaccccaatccaacagtactaagaggtggggcctttaggaggtgattaggtcatgagggctaagccctcatgaatgggattagtgcccttataaaagatgtgcaagggagctacctagcctcttttgccatgtgaggatgcagcaagaagtcatcatctttgaagcagaaagcaagccctcatcagactccatatttgctggcaccttgatcttggacttcccagcctccagaactgtgagcagtaaatttctgttgtttataaattccccagtctaagatattttgttatggcagcccaaatatacacatactcttggttccatgagggcagggaccatgtctgatttgtcccccacagaatgccaaatgccccaaacagtacctgacacttacaaatggcccatcaattattgaatgaattaaggtggcttgggagttcagagtcagagaaattttaagaagaccttgcatggagaagagacctcatggttcttgaataaaaggcaaaacgtggttataaaccaaaatgaaaattgacttctttcccagtgatccctgaagactaattcaagatgacaggcaaatgaccaacgtatccctttatgcgcttcctcatgatgggatgagggaaaaaatagaataaagaacttaaatcagaattttttgagaaagtgagttcccatttgtatcatgttatgattatacagacagaaactttccatatgttcagctgtgataggatagattcccttgaaaataagtcttcttgagtttggaatggtcatcaatatctctgacagggcaacaacaacaaaaaaacatgtctaggccaggcacagtggctcacgcctgtaatcccaggattttgggaggccaaggcaagagggtcacttgagccctgggcaccatattgagatcctgtctctacaaaaaattaaaaaattggctgggtgtggtggcacctgcctgtgatcccagctacacaagaaggtgaggccagaggatcactcgagcccaggaggttgaggctgcagtgagctgtgtttgtgccactgcacttcaggctgggcaacagagtgagaccttgtctcaaaaaaaaaaaagaaaattaaaaagaaaacacatttgtgctagaattctctgcttgcaagtaacttaaattcattcaggttaatttaagggggaaactggatcttactggaataatattgtgtagcttaaaatagtgagtaaagagttatcagtccttctagtaggacagcaatcaaagaagacttgttaatctcactagggggaaataatagactgccttttctcagtgtggccataagaatgactgggctttgaacaccttcaatccatgtattgctctactgaaaattcaaattcttgggtgaggaagtctgactggtctaccccaaaccatgtaattagtcctttgctggcatgagggaggggcagggatggtgatcagaaggaatggggtcaggatagtccaccaaaaccatgcagtgtgctgttatttaacggatgctgggcatacagaagagctatcctggacaattcaccctttggctttgtggaagaaaccatgcaattatcacggggaaccttcttgaactactttggtttgagagtagtctccccagattttttctgtactccttgctgcttcatatggtatataagtggtacgaggcatgcagtaagtcagcagacattcctgagaggctggtgggcaggaaaagtcaagtctaagtccagaatgaatctctattccatgaggctacaaaactgccctttctgtggttaaaagggcttggtatgatcaatcaatctgctgtctggctggtggggagatatggtaccagtcctggcttcttcatcactcctgcctttctaggggaggagtgacttaaactcgagagctggctagcctgcagacagtgtatgttcattgctcttcaccctgcaatgttctgatccccaacaattagtgtttagattcaacatccactaatccttgagaggtttgtcaaaaaatggattaaccatgtaaaagaaaccaagggcaggcagttcagccagactccacaaggcactggggtggatgaggcaccaggaaccaggattccctctggctttatggtctatttccttctaggcctgtttattcacaagtatacccagccccaacccatatgaccacctaggtagccctcactctgagtctgactggacacggggaacctatgggcatcaatcaactgacaccagggagaggtcaagtctaacagaataagcatagcagtagggaagttagttaccccttcaactgggttgtggggtggaggaaggaattgcccaagagtataaggattggtcaaacaacccctaatgacacctacttcattcccttcctttacagcctcttgtaacacattatttaggaaatccatccttaaaaagtcccaatcctcccaccctgacctatgctgatgctcgtcacagaatgaccatggaagctgtgaccaaatagtcagatgccacaagatataaagttctaagaacatgaaagaatgcaggactctgtcaaatcctagttagaattagtggcaagtacacttttatatcttaagaacaaaatccaatcatgtgacatgaaggatattagacgggcatgaagtacacaatcatctcctcctccgacttatggaatcagggacacagcagccgcaaattgggtatggtgctatccactgtggtcgccaacagggttccagttagcaagctggttgaaaagctctgatcattatggaatcacaggcatgtttaaaaattactctcagggatgacaatctactgaattgcatgggatgtttctcgtggggaagtcaggttaaagtatggttaatgaacttgggggaaaaacagtacagagatgacccactcaggataattaccttttaacctcaggcaagagtcaggaataaacacttgagattctataacatagtatcaacacttttatgttaagggtttattattgtctgtgattttttatgtttgagacaatctcacatttccaattaaaaatgcccactcaagtaactaagatgtacttgcggtcattatcaactttaaaaaaattgttggaacatatgttttagtttcataagggcagttacaaatgtgaaatcaaacagtatttaaaaatcccttagaagtaattgttgaaatagataatacttaaaaatagagtaagatttgcaaaccaaactttttaggctaaaggaggaactaagcttttggatttataactctaacaaaataacatatttaaagccccaaaaacaaaacagacaaaagagactgagaaatatttatttttaactttatttttattgttgacactattacagatagaatgaccacaaccatattaacaaaccaaaaacctgtgcacagaaacaagatgaagaaaatatatcaagatgttaaccacactctttggatggtgaaaacatgggtgagtttctcttctacatttctgtaacttcaaagtttctataatgaacacatttcatatataatggaaatatatgtagtaaaggtggactaccaaaacactagaatgatgacctttcaaggaaaccgaaacaaaataaccataatcccacaacaaccacacaactatttcttgtttttcatctttcttcccatctttgacatttatgcatacttatcactaacaccctaataatcacagactagtgcacagatcaagatgttaacagttaattgttgttgggtgttgggaatatgtgtgaattttctttactgaatttccaaagttttgtatgagtatgtattatatttgtaatggaaaatacatacataaaatttattaccaaaacaccaaagattatttaaggaatttgagacaaaatatttaaccaaattcccacaatgacaacactattttagttattttccacatcttttcatttaagactttatgcacacatatttaacactgttatcacaagcgtgtgcactgaaacaagatagaggaaacagatcaagatgttagcagtagttgttaggtgttgggaatataggtaattttttaaaataatttactttattttctaatttttcctctgggtatgtattatgcacaccaatggagacacacataatacactgttatcaggacattattatagggaacatttgaaaaaattaaagtgaaagtatttaaccataattccacaaaggtaatgtaacagctattttgaatatacattttgacacagttataatcataaacctgtgcacagaaacaagaatgaacaagataagaggagagtatatgtctttggatggtggggatatgattttttttcctccacttttctgtattttccaagtgtgtgataatgagttcaaattatgttcacaatgaaaatgtgatcataaactttttagtaacactaccataaagaacattcaagaaatttaagaaaataatgctcaactataagcctacaacaacaacaccacaacagcttttgactataagcatatatatttttaaacagttataatgaactgtttaaatgaactgttaaatgaacagcatataaatgaactgttgagttataactgtagtataaatatactttcgtgtcctgctttctccacttaatgttctgtaaatatatttccacgttgctacataactcgtgattatcatttttaaacagttgcattaagtgtccacagataggtttaaacaatcattctcttgtttaccatttgttactaccttttcactagctgaaggttggaacggacaccctgacttacagcaagttgctttctgaaaaggggctaccactgccaacaatgttaacaccaagtaatgtacccacaaagttcaccccgacatcaacactgattctcgtttcaagagtccttttcccatgtagtaaacctcactgcccctcagctttcccgatgtccgttccaacctcagtccttcctatgcagccagccctcacctacaccataccatcaaaaactccttttccaaactgctcaggacaccccgctcaattcattctcagaaacctggccttctacagttcttgcctctggtgttttcttctgtctgtctcctctcccctcctagatctggtgatatattaggactcccttctttgactcactcatttctgcttcttgctctcagctctacaatcttcctaaactttgacactccctgcatctttgacatacttccaagccctaatcctgcagatccagaagagtaagattcagacacatttcccccagtgggtactttaattttgcttgttcaaatgatctacacttacattttgcaaatctttttttttaaattttttaaattttatattttttttccagccaactcaaggccaaaaaaaatttcttaatatagttattatgcgaggggaggggaagcaaaggagcacaggtagtccacagaataggacacaagaaacctcaagctgtgaggtcaatttgtaattaaaagaatactaagattagatgaacacaacactcagaaatactctaggagagctgaaaaagaaggaacagatgttaacaaaacaaattaaggctgctggggaacctgagtccatgttaagcttgggttgactgtaaagaatttttttttttttaatgcaagttagacatggagttagagggtcagataaataacgaagagaattaagttagcgatagaaagatctaaggatactagctcctgggcacctagggtgcaaactgacttgtggcagcataagctgatgctgcacaggggacccaagccatgttgctacttgtcacttaaggcaggaagcgcacaaaggaagtgatgaaaggttattagcctgcaacattatttacagcatgagagcctctcctacggttctcaaccttcattaggcactactgtgatctagtgatggttgtaacccattctttaaaggcaaagatgtaagatttacagggaaaagcttcgggttttatcaattcactatcatcaaacacatattgagttggttaaaaaaaaaaaaaacccagaacacaaatgtgtaatatttttgcatgagaaccacttcaacaaacataacatgtggcaaccaatcaatctgggtcacaaaaagccaatccgtatattgtaaagccttacacagtattaggttccaaagtgttggcgcagatgaaatggctgcagaaagaagctaaagtacttatcttttcaaacagtaaggagtaaaagccatgttatctatcatgcctacagcttcacaagactatttaagggtaagaaacaaaacaattactcaaaaagatattgacagggttcaaataatgcacaataaatctttctcaggatctaagacacttaaaaatataatcaaatttgttgctctcttcctcctccaaaaaaaaaaaaaattcaaagaataccaggtaaggtacctctgcagagtaaactgtaactgtatatcatataaatccaaatatatgtgatcactgttctgtcataatttgctattttatatacacctcatgaaacactatatatacgttacacaagtgtcatttacagttgatttgggcaaactctgtagtctggaatactcatagggttttctcaatctgattacttggaaaggtaagatgtgtgctatggctttcccacatgcagacactgacatctgaaggggaaagcttaagactgtggaatctgcacattcggtctcttttcaatctgagtttagagatgttaagtcaggtgtgtaacacactaaggttaagtctcctactgacattatcatggattggtttggattctctgtggtttggtaagggtcaagtcctaggtgaaggttttctaacctttaccccatgccctcagccagtgtgggtattctggtgtctggcgagggacaggcggtcattgaagagctgcccacagacgtcacatttgaagtacttctcatcagcttgattggcaccacctgtgctggtgctggcacgttcgatgtagcctgagcactccccaaaggcatttgcaggctcaaatatgatcatgctggcatgagttttcaggtgttcactgaatgctgtgctggaagtgaaggtttctgtgcattcatggcagtcatagtatggttcttctacctgaatctcttgatcttcaccttcttctgggtcttcaattcccacaccgtcaggctcgtcggcatctccctctggctcttcagcttttccctctggctcttcagctctttcttctgggtcttcaatacctgcaccatctggctcatcagcatccccatttggctgctcggcctctccatttggctgtccagcctctccaatgggctctgcagcctctccatctggcccttcagcctctccgtttggctcagcagcctccacttctggctcagcagcctccacttctggctcggcagcctccacttctggctcagcagcctctacgtttaagccctgaatcctcagaactacttgtggaacatggacattggcttcaacttcctgggctgctgctgctgcagctgctgctgcttcatcttcttcttcttcttccagatgaagctccttatgtttagtgaggactgtgctatgaataaaggacttaccacaatccttgcattcatagaatggtatagctcctttgaggggctcagtaagaaatgaggtgtgagtataggaggacccgtactcatagggctcattcttatgaacagttacgtgatctgcaagttctgctgggttgacgaaagattctccacagactgcacattcaaagagtctctcttcggtctgacttctctgaaactcagtgagggctaagcctggaatgatagcttcctcagccatctggctctgctccagtaaatcatcttccctatgaagtctcatatgctcattaagggcagagctatgaatgaagccttgtccacacaaaaggcatcgaatggccgacccagcaagagcaggattcctctctgcagcacgattcctccgtggcttcatgggcaagagggcaataaaaccatcatcacaccccttcatggaatacaactggtcttgttcatggattctctgatgctcgaaaaggaatgagctatgaataaaagattccccacactttggacattcatacagctgctctccagtgtaatctctctgatactcgctgatggaatgggtgtgaattacagaatgtgtgtactcccgactgtcaaccaggcacttcctgctgtggactttctgatggtctgtgaggtctgtgagatccacaaagcccaggccacagtcctcacattcatagattttgtcatcagggtcatccttctgagggtcttccatgtctgagccttgaatgacagggtcttcaattgtctcctgaccatgggtctcctcgctgtgggtctcctccccatcagtattctcgccttgagactcctcgccatgagacttctcttggtcatagattttctggtttgtgttgaggtcttcgctggtagcaaaaaattgtctgaagtccttacatttgttccgcgcttgctctttagcatactgctcttgggcgtaacttgtttgagggtcagtaggggccaagctgcgaatgacagaccattcatagtttctgcttccagagggcttctccctatcatgaatcttctggtgctcagtgaggtcagagctatgagcaaagcactccccacactcctgacattcatagagcatccctcgagggcgaaatgtttgttcaccaaaaggcagagagtgaattacagaggtctcattgctcctatgctcaatgtatttctttttagcacgagccttctggtattcacggacatttgagctgggaacagagaattcgccatccttcttaaactcaccagatccctctccaggaacacttttctgaggtttggcacggaatacactctgtatgacagagtcttcatagttgcgattcttactgcccccttcacaagggttctctctggcaggaatcttctgtcgcttatcattaaggtctgagatataaatggaggattctcccttctcattagattccaccaattcatttccattgtgacttcttggaggtttggaagccactaagctatggataacagacctactgtattcccttccttcagaggtgttccctccagcacgaactctctgatggttgatagcatcgaagctctgaatggtagactctgccattacttttggtttactgggccctgctacactgtgacttttctgagcttccacagaggctaagctatgaataacagacctctcatatgattttgcctcatagacattttccttagtgggaatcttctggttttcataggggttagagctaatggtgaacgccttttcgtcctcatcactttcaagaggtcttgttatagtatgactcttctgagattcagtgaatggcccactatgaatgacagatttctcataccctctgccttcaaagaggttctttcgagaatgaattttctgatgctcactgagctctgagctttgcatgaaggcatcccggccatctgtaaagtcacagagcttctccttattgtaagttttctgacgccttttaagggactgaccaggaataaaggtttcctcacacactttacccttgttttcaaatgggttccctctagtatggattttctgatgttctttcagggatgagctatgaaggaaagtctccccacacaccttacattcgtacattttctctttaccatacattttctgaaactcattaagggctgggctgggcctaaaggtttccccgcgctcacgttcacgttcacgttcatgttcacgctcattatctttgtcatccccaaagtggattttctggtgctcaatcagggcagaactatgaaggaaggtttccttacacaccctgcactcgtagaatttgtctttgccatatattttctgaagctcactaaaggtggggctaggcatgaaggcttcctcacattcctgattcttacattccacaagataacctctagcatgaatcttccgatgttcagccaaggcggcactcttattgaaggtctctccacagtccttacattcaaaacgtttccctccaacctgacttttctgaacttcactgacagccacactgtggataaaggactcaccatactcatagaggttctctctagtatgcatgatctggtgctcaacaaattctgagatgacactgaacgacctcccacactcatcacatacatatggcattgccccaaaatcaattggctgtgactcggtaaaggagggggagctgaggctgctcaggctgctcacgctcatggcttttctcatctcactaccacattcaaagggcttcttcctgggacagcctttttgatcgtgaatcgagcccttcccatctgtgtcaaaatgatagcgcctctttctttcaagaactctctttctggaaacaagggttgaattaaacctaaagcctcccctaaatgcattcccttcataaacccgctgctggatcactgactccctcttgttcaatgaaatgtccttccagttatcatctgacattctggggaatctctgtgaccggtcgcttgactcccttgctcttcccgatttggaactgcgtgacacatccttgatgaatttttccattatcactccgtgggaagattcatcttcacaaatcccccgccggtgggttgattttttggcttcaggcatagtttttagacctggaaagaaaccccaaatgtaaatactccctagtccccataagaaggacagtgggacttggaggggtgcacccttctgtgatgtttaggaatgcaaagtgtagaagttccttgatagcatctcactggttgtgtggctcctctgtgggatgtgcctcctgcttacctcgactggtgcttgggtaggcacttctcttggatcttgatgagtggccctgcgtcatgtgggagtggccatcgtcttcagcaagctgcactcctggtcacaaggacaatatgatgcctcaaattcaagttgaggaccaagactcatcaccataaattgatcttcatctttcactgagccactaaatatgaggtggcccacatctgattccttggatgtcagaagacatttgctgtctcatttccctactatctattccctaatccattctaatctacatgtaattcttctgactccactcagaaatgtgtacaaagaccccacatgtccctgaaatcagtgcattgtcttttagtcttcaccttcttgtaaccactttttaagtcctcttttccactggccttcttcctcttacctcgcgactgctcttcctccacccactcccttgaggccccatggccttacagacctgcagcacagccaactgcccactaccaacttgggctagatgtcttccaggaaagtccacatgggaactcaggatcccatcctgaatgtctacttaaaaacctccagtgctaccactctggaaaaaagtatcaactcttgtggcaagaagcatctccctgcttgtccccaccctgtacaatgtatctttacccaaagccagaggcatttcttaaaaacacaaattttatcatttactccctcatttgaaatctttcaaagatttcttattacccttgaagtccaaatatattaatgtggactctaacatccagcttaaaaaggagcaagatgacaaaatgctccaatgactggactgggagtgactgagagaagcagctgcttaccgagggagagcagcttcctgtagttttccatgttgtcctggattgtgttgtgaggtttcctgtcctcagcgaggtccaccacattttggtatgattcagcatcctaaaacagcaaacacagacctctcaatggagtctgtccccaccgatgttcaaagacagaataatgttggcaacatgggagttacatatatgaagttatataggaagtgctcacggtattggggttctgagtgatccaagtcaagtgttactagggacctacgtcgtacctaccttggtgctacactctgaggcagatcccaaagacgcatgacacatattccttgccctcatgcagcttataatttggttggagagaaaagactcatgaaacaattagagaacaataaacaataaatcggggtacagatagtaagtgctaaacgggttttgtagagggacagttcagggtgggcctgaacagtgtgcaaaggtttgtggagggcaggtggggccttaagtggtaagtgagattatgacacatatagaaagggattggtgggaaaacttagactaaatatcaaacaggcacggagtactcagggaacagaaagaagacacacacattcaggaagacatctggtcaggatgtgacttaaacctccctcccggtttctccatggcatagcatggctacattgagggagtctccagtttgcacaatttccaaatcacccaggaataactgtaagccctgagggcatttttataattgccttttctgtcttaatggatatttacctaaaaaggaattttaaaattcctcacattactgaggagaaccttctaccaggattctaaaggacctttgcttattgccagagggctgactagaactggtttcagggagtcatggtcccaggaagaatggcactgaggctggagagagacttgaggagggagatggtgctgtgggaagcccacaggctttggagctggacagagatctgggtcaaagaaggattgcaccaattatgagctatgcagccttgggaacggaaatctttttgaacctttctttcaggttcttcacctgtaaaatggggagaagagtatctatctgctttgcaatactgtgggtgaggattttctgcagtgtgatgtcttgcttaaatattaagaaaattatgtaaaggaaatacaaatgtcttgatattaaatctaccatagttctattgctgggaagaggcatggagcaacatgaaaaatgtagcaaaaaaaagaggacttgctgagtaagcaaagacaaagaggtacgggtatctgggtttaagagggaagccttatccatgaactgcctgtgtcctgccacaaaaaagcagaaacaacaacaaaaactaagtagggcaaggaaacacagcagagcttcacagataaaattcttttttcacatgaaagaaaaagcacgctttgattgaaaattaaaatctaggccagtgggcagccctaaattggttgttcgctttgtgtttgtaatcaacaatgacatcttaatgcatacaaactgcaatcaagttcaatggaagagatgctgttctgaaaacaatgctagtatggctcaatgtagttttcacaacatgatctatacatgtgaacaattaagaaatttacacatgaagctaaaagatgagagaattttctgttgtgtacaccttcaaaatgtaatttgtgtcatttgctgctggtgttaccaccatactgagtcagtaggaatcagtagcttccagacttttaattatgcagacatggggctcggatgccaattcttcacacattgtcaaggaagggcatttaaaaagcaaaacaagacaaagcccaactaccaagacaccagtggccaggcccacacatgcctccagccttcttcctatatcccagccacctggcccttggtttggttcccatcccacaactttagctgagctctccctaatgcctggggtcccctcccccaacacctgacccggcgtgctcctggctctaaatggcaactgttaatgcctccaagacatttcccttcaatccaaatcaaggcccttgttacaatttcttgttaactctctatttttccttgaggacactgagaatgatgagcagttatatacaacatttgtgtcaatacttatttgtgcaactgtcaaaagcttctcagggcagggcccctctctgtgttgctcactgctgtgccccccagggcctaggcctgctttctgacatgggatgggtactgatatgtgaaggaaaggaaggctcagcccaatggcttctcccttctttgagtccagtcagtgctggggtcctcctccacactccaccatgtataagtgacccctctcctccttcctaaaaaacaagctcaagttccacattttttttcccttcatgaatctccccggcacatgctgcctcttaaaccacaactgccataattgttaacatttaacggtgtgcctaccatgtgccaggtactttatgtatgtgtgtgagtgacttttcacagcagccctgggagcaatcaccatattcattttacagatgaggaaacttaaattcagcttatgagtaaatggcccaaggccacacagctagcaagtggcagagccaggctttaaacccagctcctgtcagctccagagcctttgtgctccctggccagtctactctgcagacccacagctttcctggctccctcctgaggaccagaaacatctccagagtcactctgcttccctggccctgtagggaacggccaatgtgaccaacctaccaagtgacacacatgctgagggggcaggagctcctctgaccacatgaacgacaaagaaacagccagcagcaacctgggctacttgtcacctaagggatgggcccgggctcctcctggagcgctgggactctcaccccagctggactctagggggcagataaacacaccatctggggaaagaaaggcgtctctgccatgaaatgaagatggcctttctagaaagagaggaaacctgagcatacctgagatcgggactcataagccctggagtccctgtcgtcctctctgtccatttcaaagcttgttttcgccaccacaggaagggaaagatcccgcggaggcatccctgggaagaaaaaaggcatcaacaagaagcagggcccagtccatcctgcaggtcccaggtttgtcccactcaactatgaagccagctggggtgtgagtgtatgagagcaagtgcctttctcttctctgcattctgtggcagcctctgaggagtcccataaaaccagtggccctacaacaacccagacccagggcagggccaggggccctgcctcatccttctgctcccagtctcggaggtggttcagattgtgcccaagctgtgtgggtccaggtacagtgtccactagcctcatccttcgggcacaacctctgggtctccccagctgcaatgtgtgacagggagatggcatcagagaccgtcccacagggtcatggctctgaacaatgcctattgtgttgtgaaccgtcactaaatgtcactcactcctgatatccttctcctgatcaattttagggtgccctgctgcccacagcagtgttctccaagtccaggaagaagaggaaatgatttccagcagtatggacaccaacaatacactggtgtgatgattgattcccttccaaatctcaggcctggtgctcagatgtggcacttccctaacactgcaggaagtcatggcagacattcctagttaacaatattgttacaatgtgtttttcattctcgccttctgcctatggcacttcatactagttttcaatttttgcagtggcatagtctttcatacagaaacttccagtttttttttttttaatgcaccagcttaagaatactgagcaaatagtttaggtggcaacaggtctatgtggtgaaacctgtgctggtggtaccgagtggaacttcaaaaatacgagccttggactaaacttttggggaagcggaatatactccaaatggagcagcagaaacttcgaggccctggcactttccccttgaacctgtgcacagcacatgctctatatctcctactgggaaagaaagtggttaagactcactgcttcttgggttcctggtgtgggaccagcggtctcgtggctccatgtctctgcttctgcccctccggtcccagtcccggtcacctaagcaggtgagacattccagtggttaacaaagctctttgacacacctgttttccctgcatgtgcacaaacacccctctggaaagagatgctaccctcttcccacaaggagatggatccaaaacagagagctccaggttcccaggctcatctggccccttctttatcatatacccgcaacatggtttctgcaggctttgcccaagtggggcttgcttccaagcaagttccaaagctcagtccagtagctaacccccacttcagactctttgctggcttcccagttcctaaggggctgagtccacattcaggagaatggactgcagaccccctactgtctggcagccgatcttaaagtacacgttattctactacaaaaaaaacaaaacccaagaaaacaacacacacaccctccctgaaagcagtgctccctataaaagctcactgaagcatctttaatgaaccttcctgaggaggctgggggtacagctggaagcagcctgttgcaaattccaaatagctttatatactttatcgttgaataaaacggtattaagtatttaaggtgtctgtttagatataaaaatgtctcattatgacatcaattaatttaccctctcctcagatctctgagtgaagctgaccactcggggatggcgggtcatcttcatggaggccccaacccactgtgtctccatctggaagcatctggcagcgcctgcccatgggtgaccagtggggatgggtactcaccactgaaagaatggactgagtgaggtggtgaggactctcttctgttccgggtcatgtcgtcgtcgctggtcacgtcactgttgttgtcgtctaagaggacaccggtcgccaagttactatctctggcccacattctcacaatagttccccccaatccctgagccgcatctccctgtcacagacacacatggttggaatgacctgatcctgacatttctgagttcaaaacccttcagcggcttccaaccactcctggcatactaaaaactgggtggggggagcatggtggctgtgaccaccccgacctcacccccagacacaaacagccagaaggcaacctcctagcacaccacaccaaaaaggcaggagccataggaggttttctcccttctacagaagtgtctcctttccctctcctgactcaggatggtggttctgcactagggaggttttggcgaccaggggatacctgggcatgtgtggagacacttttggtggccacacccagaaaatcatgatgcagctcaatatcccacagtacacaggacatccccaccgctgcccaggacagagagttatccagtccagaccatgtcagaagtgtggaggctgagagccccaggggacacctgaggcctgcactgaccaccaacaccccgtggagactctcaccttctggttggtacatctccttgtaattctccagcagagtgacgagcttctcacagttctccggcttttttgctcgcacccaaggcttgagcttttcagggatgatggtcaggtactgctcaaggaccaagagctcgatgatctcctccttggtgcgggtctccggctgcaaccaatcgaggcagaggtttcggagtttgatcagggtcttccgaggcccaacaaattccacatagattaggttccgaaacctctgatgaaaaaactcagagtcagttggaccttctcctatgatgacatccggctccttagtcaagtcactgtctagctcatacagatttggggcccaggacttcttaggtttggtggcagacaagtgctttggaggcagcatttctctaagtaaaattttcactggaggaaccaaacatgagtcaacaggaaagacgcggcagcctgtgaccgtcagtactcagggacctgtggatcgtaaggagatatacacatgtcccagaagttgaagaccaggcagcagtggaggccaccttaccagaggcatcgacaatgcttttgggatatgggagtccccagtaaataggcaaacaaccgcacaaagttggcctcagcacagcagttacaagcatgacctctgggcttcacagagacctactcgaggagttagctcggctactaacttgggctactaacttgggactgtgggcaacttgtctaatgccctagaagtctctctgtaatctgagaaataagaataacagcacctccatccctttcagaattgtgaagcttaaataaactaagatacctaaaaagacttaactgcccaatgcaaggcacaagagaaatgttcaaggccctagccagtactaaaatcagacgtcagcacgtttattagcaaaaatgaaaaggggaagtaggagttggggcaaatcctcccctaacatttcttcccttaacacaattattaaaacacagtatacaacatgtaaaaaatggaagaccattcaaaaatattaaaagtactcaactctaggtaatatgacattattccctcacacagtgagaagtgaccattgagcctcttgatgctactgcacgttcttttgccttcatcaatcttgacaaaggtctaatctgtctaaaagaaccggctttctgttttgacattcctttcttactgtttctttacttagttcatttatttccttctctttattttattatctgcccccttccattttttaaacttttgagattggacataaatgtaaagattttcaatctctccttttttttatgtaaccaagtaaagctatacatttccttaaagcatttttgctattatttgcattttattgcgtattttaatgactggtcagcacatctggtgcaactaagtaaggcaatatgggaaagaaatctaggtctgggagcataaactacctactggctttacttccagagaagaaaaaaaaccatatgcaacagaaattttctccctttgttttaaaaggaaagcaagtttaaattttttaatttggaaaaagtctaaaggaaaactgaaggtgtttccattattcagagtctctcattagacattatcacttgcaaatcaatgtggtaatcacggtaaactcatgtttactcgtctcagtgatgggctcccacttccctccctatgcaaactgccctcccacgctctctcctgcatattatcatcccatggagcttgggcaccatccaatgcaaatgcctcgatcctgaagaccttagcgactggactatttccttgctgccttccttcataggactgagaaaccacggagagcacaacatagataatgctctgctgggcagaagaatcccaaagcaagggaaggcaacagaccagagagtccaggctccagatgattggtgtgacatttcagacatggtcactctaacccaggacagggcaagagcagaggtctgtgcctgtgagggagacaggcaagggcagacggcccaactctgttatgtggcagacagactcaggagaacactctggtacctgaaatgatactagccctcatcctcaggcaacaagataccctcagatatgtaatcacctgtctgggaacaggatcctttctggaacttcagaccaagcagctatccacaggaacagagtcaaaacacaggtatctgcagaagttttaaaggaagaaatacacagactaagaatatgaaagacatgtagaaggagtgtcagagaattaactccccaaacaactggggactcaaatagcactggggtgatgccttctataccttcggggaaaggccattcccatgctatataaaccatgccagacaggagaaataaaaagctttcaaactgtctttatgaaaccagaacaagtcaaaaacgcaagacaaagatatcactaagaaaccacgaaccaaaactcatgaaagcagaaataaaagtcttaatgctgctattattgaacattattctatgcagttctactcaattacaataagacaagaaaaacacatctgaggcacagagagataaaactaacattcccttatgtaagatctatacacatatatatgcttctattctgtgaatttctctccctaacagacatgaattgaagcataaagtaccctaggtgaaagctatatatcagaatggcaggcttatagagttcaataggaaaccaataatttttttaaagaaaatacaaatagcccaacctgactcaagaagcagagaaaaatatgaccactagggaagaaatctaaaaagctgaaataatgtaaagagcaacttcccaagtaaactttctgtgaataaaatatttaccgtgttataaaaaccattccagagcacagaaaagagatggaggacttcctacaattaattttgtgaccacttgaatgcccatatgtatcttgtcacaaggtggatgccaacttctgtgccaaaaaaaataaaacacattgcttttcctcaagaaattcaggattaaacatacacaatcttcccttaacatgctcaagattttctgaccaggccaatagaacttggcccttggtcaatagaagccattgaaaaatggaagttatttttttaacagaaaaaccttaaaaaaaaaaatcagatctgagctacttcccaccatggcagaggaaactcatttgggagtaaagaaaggctttggaaacaaaacaatcaatcataaagccgggcaacatatgtttgtatgcacgggaagaaacaagtacactcatatactgcctgtggcaatgcaaattttatcaaaattaaaagtgcacatatcctcctctcctacaaattctacttctatgaatttacctcagagatatgtaatgacctatgtgcaagaatatattcattgaagtgttgttaatagacaagatatgttatgtttgtataatgaattactatgaaaccctttaaaataaggcaactctaaataaatgagtatgaaatgatctccaagatagttaagtgcaaaaccggacacagcactgtatacagcattctcagaaactaaaaaaagatgtgcttagacagatgatttctagaaggatatataagagactattaatgatgactaatcgcaattgcctctggggaagggaactaggggtcaggaaagggagggcaacttactttttcattgtatattctccttttgttttttgtttttatttttattttaccatgagcatgtattacctagtcaaaaaaataaattcaaagttaaaacaaaacaataaacaaaactaccagtagaggcctttagaggttgtgctactcacagagcaggtgcaggcagccgtaacatctttacactgatgctgagcccaggctctccccgcatcgcctccctatcaccatccacagcttgaatccatagtcataccctaacctggccattagcaggtacatgaaagtcaatttagaaaaccctaaagaatcaactttgaaacctgttagacccaataaatacttatgatattgcagttgcaatctgaatatacccctcaattacacccaacaactgtcagtacataaatacaatgccatcccctatcttggcaattccacttctgaaatctaactcacagacccatctgcccatgtgcacaaagatatacagttcaaaagtgtgttcacagaagcactgtttacaacagcagagaacagggacagtcaaacaaatgctcaagcgtaattccaatggcagagaccactgaaaggccaccacgtgggagacaggaaaataaagatgggtccaacttttctgcactataaaaaccaaccaaaataaaaaccaagcaaaaagggagggggaaaagtattttataacacagatgacagttaatgtttgaaatgtaaaaggcttttggcattaggaaaaatagcccaatatgaaaataaacaacactaatacacagagttcctaaaattagtgataataaaggccggttacttaacatcaaaaatcaaagaaatgtaaaatattacaataaaccttttttgacctgtcgaatgggcaaatgtttaaaagatgaaaattgatgctagtgagggtgtagagaagctagctggtgcaggcatgaaccacatttctggatcccattttggccactgtttaaagatactaaaaaaaacacctacttcttttgaaccagcaattctccatttaagaacaaatatagccaagtagataaaatgataataagaaaaaaaagctaaaaagtcagctgcagctgggcgcagtggctcacgcctgtaatcccagcactttgggaggccgaggcgggtagattacctgaggtcaggagttcgagaccagcctggccaacgtggtgaaactccatctctactaaaaatacaaaaattagctgggcgtggtggcagtaatcccagctactcaggaggctgaggcaggagaatcacttggacccaggaggcagaggttgcagtgagccaaaatcgcaccactgcgctccagcctgggcaacagagcgagactccatctcaaaaaaaaaaaaaaaaaagtcagctgcacactatggtttaacctttgtatgtacagctaatttctggtttgtaaaaggtaaaaccttgaacacaaaataatggcaggtaacacattttacacatggaatggtgggaagggacgagcaccactgacagggaaacgtgttctgttgtgttactgctatgtaaccacagtcctaacacaagtcacattagagcaacccagagccaaaggcaggaagaggaagtgctggtcaaccttctcctgcagggctacctgacacaaggtgggccatatgcaatgaggttagctgccttcctggccgagtggcccaacccttagccttggattcaacccgtcctctacttgctgcccaaagggcaactagcagtggggccagatgctgaaatttgcacctgccagggccacatacttacctcaccctgactggggaagaccagatcccacgtgaccttctgtgacagcgagtctggccaatcaaaagcataactgctctgcccacttggcccccacttccccaggccagcttctccatggcaacagccacgcctaccactgaagaaaacagaagatacgtgtttgcaggtgctgagaggaagaaaggtctaaaggcttgcctgatgctatcaaatgaaatattaaagctgaggagttaatctgcctgaggatggcctaaacgggccatcaataaaaacgtagcttattaatcagagctgtgcttgaagatgtatgaatccaacagaacaacagagcacctgtatttataccctaccgcaaggctccatgggcaaagactctgttacctttttcatctctatatttttataggtgttcaataaacattatttgcatatagatgcaaaaacatttaataaacccaaactaacaaagtccaaataatagcccatgatcttgaaaggctattccaggaatacaaggaggatgtcccatcagggtaaactgttacataaaggatgaaaggggaaggggagcccacaagcagtatttcaagttaaaaaacatttgcaaacttcaacagcctttcctcataaattcttagcagagtaaaagcaggagaccatctaagcattataaagacttatctcaaatacatgcaaacaagcatgttattaaacattaaagatgttcctctggaagtggggacaaggaagggacagctataccacaactacaatttaacatgaccctggaagtcctagctagtgcaactgaagaaaaagaaaagtataaatatggggcaagcattattttgaactacaaaaccttatgagtaaatacagcaagagaaataattcccattaatagcaaaacaaataaataaatctccataaataaatttaacaaagttacctgcaacttcaaacaaaatttcaaaaatttacagaaggaacacaaaaattagccgggtgtggtggcatgagcctgtaatccaaactactcaagaggctgatgcaggggggccctgggaggtggagggggcagtgggctaagatcatgcccctgcattccagcctgggtgacagaactagactgaatcaccaaaaaaataaaaaacaataaaaaataaaataaaataaaataaatgacagaagggcaataagtctgaaataaatacataaagacacgtgtatcacatttaaaaagctcctttttattttgaggtggggagttttgacaaactgataatccagttcttctggaagaataaatgtacaagaatatcaagacaaccctgcataaggtctatttggagtgggaggtggtttgtctgtaaaatgactccaacacacaaaaataaagtgttttttccaatataaggatataagcactaggacaaatataccactgggacataacagagtccagaattcaactgtgtaaaagtctatagacacatggggacttaatttataataaaggactggaaatggattccttatttaaatataaactaggaactttcttacagctaaatggcaaaggataactttaacaaaaaggccatgacaggaccgctaatacctcagtgtttggttactcaagcatgcatttctagaattagggttggcctttgacgttaggaaaggccaatataaccactgctggcatggagcctcccctaagaaattaggtatttcagctacacatctctggaaggctaaggccactagggccagtgacaaacatactttgttctaagtaagttactgcatccaaaaatcagcatctctcctgagttttcattaaacaaggaatgaaaacaaagtatttagcaaaatgttacataaccattaagtcgtgttgtcaaggaatgttacagctttattttctgattataaaaataaaacacagcactacatgcaggtattgcaaaacattcaccatagaaactgcaagccacacccactggttaactttgttgctattaataaatcttaaaatctatacttatgttgttcttactgcaaatattcccatttacgtgtacacagagaatgagaatgtccacacaatggaatataatgcagttttcagaaagcaaagctatagatggagaccttgagtgtgaactgtttaataaatggcatgatctcatgtatgtaaaaaataatcaaacatatggcagtacatacaaactaaactggaagaaaactcacataaacttgtattaagactattcataaaatagaggaaatctatcagaataaatgattaataataacaagtctctgtttctttttccatctctatttaaaatgttattttaacttcgcaatcaggaaaaaaactgaatataaaaatgtaagtaaatgcaattactgtttcctagcgtgtttgttttccttcctgcccagcttgttacagcacatcaggccctgccctttctctgctgggttccccataatacaatctccctctgacccttaagcactcccaccgacagtaccctgtggtcaccatctgtacctcccctctccagtgactgtaccacagagggggctaacacgcatcaagctccacacccaaatcctcacttcattgacagctgtctagccgtcatatggctcaagactgaactctggcccacagggcaaacccatatccttcctggcttgaaggtgggctcccacacacccctcattactaaagcttccatatctccctctgctctctcttcagagcaggactcagtgttaagtagtagccaacagcagttaggggcacacaagggctagctgactctgggccaggggacaaagaaaggtcaccaacttcaaggggagggaggagaggcgccaagtgatggggccactaataaaggatccctctacacagccaggcaggaagggtgcttctgggagtctggcgttctttgatctccaaaggatgttttctttacactagatgtctaaacatgaaacctctctgtatacagaacaagcctggcgctgcctgctgcatgacagcattgccattgaagtctggatggtggtactgatgccattctttggatattttatgacactttacttctattccattaaaatgagtaggaaataaaagcatggctcttacaattaatataacacataataaagatgaaactcatcaggcatccttgccagaagtcagggaagatccatggctttaatcagagaaatgatgggtcagtgttcaactgagcagggaagaacttaatgaaagaacacatcatgcactagaaagcgtctgggaccatgtgtgagaagaaatcctgtgactccggtttggcctcaggctcccacatcccatctgatgcaggagaaaatccaccgagtctccttcagtcccatttctatttacttactttggtccctcaccatggtgcacctagattcagccccctaactcgttctacctacctcattaaaagggggctggaattgagaactttaaagtcaggaaccgaggaggttactctcttcgtctcccagggacagcgtggtgtgtggtctcgtctctcttcttgtttgctccattctcctgcctctctctgcagaccgacattctctacttcagcacgcacatggagtaagatgctgtcccagcccaggcctacgtcacctcccagtttaaatgcccgacactcagtgtcccttcatccaaattctcagtattaaagtgcatgctacagcctgattccttctagggcagtggttctcaaactcagatgtgcagaagagttgcctagggtgcttatgaaatacggagctacctttccaggtgggatgactcaggaggtctgtggttccccaggaaagaagcattcctacaatcactccaggagctgttctttgagaaccactgctctaaggtatccagtctggtccaatcacctatgaataaggtacatatgggacatagggactttagagggaaaattttatataggagcaaggagtaaatgaccaccaactccatctcacaggccacaacctccaccctctggtctgttggctggcttctctcagataatctcaacatcctgggcttatttctaccacattaagcttagcacttaccacactgcagcaaaatctccttgttgttgtccatccttgagagatttccccaaaagtttagaaagagaggaaataatatctaagagttcagtcttatgaccagcacaaaatggttcaagacaaataaagctactttaaagagacaaaatgtcttccagaacagtatgagttatttgactatattctaataacaataattggctcatctgatttttttaaggggagggagtactaaaaagtaggccacaaagcttggtccatccaaccatctacaggatagtgaacaactctcatcagacctaacttgaatggagtttggggaggacaagggtgttagataaggggcttccgatatcttggtaaccctaagcaagggtttcactgtgacaacatggctgtaccaggctatgtgacaaaccagcgctattaaagctcacccacatcctcttggttctgattccgtactcaccaagcaaccttctcattatggttgtgtttcccatgtaggtctgcctacagggagagaatttgctgatcatacacactgctgagtacttgggtccctgctattgtactcctaccatgaattaataaaccagaattgtgggaacaggaacatcctatttcaagtcacatgtcagtacggttttaagtctcctgagcttagttaaatgtggatctaccaacatgagccctcgggcaaaggaggtttccaagtctccacagggttaagcaccataatgcatatcttgagcactgaggccaggaatacaccaacccatcccaagggctcacctggtcatgtcagcttctccctaagcagtattccaccaccaccatagccacctatcttggtaaacacattcttactcttcttgtgatgggagtttccattcagtagacactgaggccagggattatgtcattcacttctggagactctaagcctggcatgatcctgtcctggatcaggcccagtatcaatgcttgctaacaaatgaacaaacagacaacctctagctatgtgcttgcttccccacatcatgtgactcactgtgcctcctctgaatcagtcagcaggccatgaacagagaaagtgaggagtctccctcctcaacacctctcaaataatctacccacttcactcctccctgtgatatgaccacaaaccaagccaccatctctcacccaggcccaagttggtctccccacacccactgcgtccaccctccccttctgcaccctgaaaccagatgatctttttaaaaccacaaatctgattatcatgatactcccatggttaaaagcacttcccgctgcacttaaggtcaagcccagttactcaccacagattacaagtcttttcacaatgaaaccacaacttaccttcttcctacctcaatcagatgccactcaacgattcccttgctctaggaatcctggattttcagctcctctctctgcatctctcaacaacaaccctatcccctctgctgagactactctccccatgacacacaccattcacactccttcagggctcagctttaatgttctttaccatctcagggaggcccctatgtggcctctctaagattaagtcagctgttgctagcagatgttctcttgcaaaagtataaatcaaacaattatgttttccacagctttaattcccaaatagactaaaaactctttgaaaacacttcctttcccccattggggctatgtcccagtacctggcacaaagtacacacttgatcaatattcacaaatgagtggatgaatctctcatgcttctttaatcaccaggcaagagaaaaagagtagccctgaaggagtagctgagtatgagaaaaagagggaggatactgaaatggatggtgtgaggccaaggagaatttttagagaatacacaatccaccagaagagtctgggtgttctcagagggcacaaatggtgctggggtggctatgtggaacacatatgcagtaggaaagtgtcagagtaaggaagtgcggtggtcactccaaagatgaatgtggcactgtgaggaggaaattcaactcacctggacccagccacctagcgtttggacctagtccctcttcctctcgccagtcgtctccaagaaggacggaagatcaagaaggcaaagctgtagaggaaaagaaaatgtgagacgccaagtttattttgcagttactgggttcctcaggggggaacaataccacaacagttccacatttatcttctatgatggcacaggtcaaatgagaccatgaaaagcatcccatccaggatgaatggccacgggtatagctcccttagaccacctcacaccctgggatgtactcatagactttctccaacaaggttacatcaaaggcattcaagtcaatttctggggtgtcttacaaccttctctggggctctagattaaggaatcaattcaagaaccccatttttggcgctggccgtccccatgttaggaccgctatcctatcgttattattaggtaatagtaccctttatcacgtaaaatattttagggtttatcaacatgttctcagtggactaataggacatagtccaagtcccactgcacctcagagtatgtgttcaatcaattagaggtccctgggggaaggaccttcatgattatgagactggtttatattccaagagtcaggtgggcatattttggtgaggttaaagagcttattaaaaactattcaaaggatgggcgcagtgactcgcgcctgtaatcccagcactttgggaggccaaggcgggcagatcacctgaggtcaggagttcgagaccaccctggccaaaatggcgaaacccctggtctactaaaaatataaaattagatgggcatggtggcgcgcgcctgtattcccagctactctgaagaggctggggtgggagaatcacttgaacccgggaggcagaggctgcagtgagccaagatcacgccaccacactccagcctgggtgagagggccagactctgtctcaaaaaaaaaaaaaaaaaaaaaaaaaaaaaaaaaattatgacaggctaggaaggaagcgtcatatgtgtcactttccctacctcaaacaaaacaaaagggctgacttaagatctccttgggtggagccagggctaggtaagtgagctctaggactccgtaggagagctagggctgggagggccacacccaaacgaactaagctttggaagctgggcagccctctagcggctctgctcatgaacagtttctccagaggccccaccctacctatggggcagcccctttaaacacacccccacctgcccagggcagcctcctagttcccatgcactgcccctctcaggaccacccgcagccctgaatttttccacctccagctgtacgattttgagtgaaaatccttcaccaacagagtctccaaatcacctagaccccaaatcttacacccacagcccacttcctccattttctcacttaaaatcccacctttccccaaatctcttaaaacgtctgagtttggccttggattccacttttctgctcactgacccaaggctgcacagctgaacccgcccgcttcccgaggcctggctttggcgccccctggaggaagtaaggcgccaccagccatgagggcacgctgcccaagatagcgggggtagggctcagctggcacgccagtgcagcccgcggtcactcaggaaggctccagtgcaggccccacccatgaaccggcaaagatggcacagaatgaatgaacacggctctacggccctgcctaccttgaaatcccctcagccccctccaacagccctgctgtcactcaagatggcgcctgcgcagtacacctctgctgcccccgccaccggccaacacacgtggtactaggatggacggggctcacgctcactcctacagcgcagctgtcattcagtaatggtgcctccgcactgcacccgccacattgaatgccggctgctctatcagacaagacacacatgctatggcccccctcagtcactcaagacaaagcagaccctccctcagaaccgcacctgcagccagcccagctgtcattcaggatggcacctgcacagtacaccgtggctgccacctaatggccagcaaagatgatgccacagagtgggcggggccatgcagaccccgtcagtcactcagtcctctgcacccggccctacagccaacccagcagtcattcaaaccagtgcctgtgtaactgccctcacgtgccccattacagccaaagattgcaccacagtggaccaggctcggcagcccctagtcactgagaaagccctccctcatgcccgcccctggggccgacccaggtgtcactcaagatggcgcctgcgcaatcaacctcgggcgccaccctgtggctagcacagacagtaccgtagaggcggtgaggggcagtggaggtgagggtgctctcagccctatcagtcccgaggaacggtcccgggccccagcccttagccccgccagcagggcgcctgcacaacccgcctcgcagctcccccactaagccgcccccatacacaagatggaaccacacgcatcctgtggtgaacaaagtcttggtcaggcaacaacaggggaaggggtgagcctctgccaccgttagccaaaaacacagcgagcgcggtgataacccgtcaccctgtccttaagcataaatggctccgcggccgctaaggcaaactctttaggcacgtctcccggctcccccagatgcggggactgagccagtcccactggcaaaacagcctggcgaccagcacacacagcccaaggagcgcggcactccacagctttccatcaccgcaaggcaggcaagcacagcaaccgtggccccgcccctccctgtggacaaccccacacctatgcggcaaaccgcagccgccccgatcaaagatggcacccaggtgggcggggcttgaacagaccgtcccgcccatgccacctgcagccacttcagccttgccccgccgcatctgccgccaaccaatccgggcaacgcctgcgcggcaaacctcagctgcccccatcaaagatggcgcccaggcgggcgggccttgtctcgcccaaccaactaggacagcgcctgcgcagcaaatctcaagcactttcattaaagatggcgcccaggtgggtggggcttgaacaaaccactaggtccaatgccaccctgtcacttcagccttgccccgccccatctgccaccaaccaaccaggacagcacctgcgcagcaaactccagcagcccccatcaaacatggcatctaggtgggcggggcctgagcagatcgtcatatccaatgctacacagtcacttcagccttgccccgccccctctgctaccaaccaaccagggcagcacctgcacagcaaacctcagcagcccccatcaaacatggcgtccaagcgggcagggcctgaacagatcgtcacatctaatgctacccagtcacttcagccttgccccgccccatatgccaccaaccaaccaggggagcacctgcgcagcaaacctcagcagcccccatcaaacatggcgtcaaagcgggcggggcctgagtggatagttacccaatcacttcagccttgccccgccccacttgccgccaatcaactagaacagcgcctactcggcaaacctcagccaccctcataaaagatggcacccaatgggtggggctggaacagaccattacatccaatgcaacccacagtcattcagctttgcctcgccccatctgccaccaatcaaccagaacagcgcctgcgcggcaaacctcagccaccctcataaaagatggcacccagtgggtggggcttgagcagacgattacgtccaatgccacccagtcacttgagccttgccccgccccatctgccgccaaccaaccaaggcagctcctgcgcagcaagcctcagccgcccttatttaagataccgcccgagagggcggggaaagaaaacccctacaggcaggacagcccttcgcccctcccaccaccactgcggcaaacaagccccgcccccagagggtagccgggcacgccggcgccgcgaggccgatggcaccccgcaggaaggggcattttcgcagcccccagacccagcccaggaggcccagggctcccgagagccgcattccgccgtggcaacagggatagcattggtgtcgaccttgctggacttgccgtggcagagcccccggctgtctgccctaatgcccccggtttgctgcggtggcccccggccagtcagaaaggcgcggagaccctgcagcagcccctcagaccccggactgcaagatggcggcaccaacgcagcagcccgggctgcgcccacccctgccccaaaaaggcaccaaccatccacagcctggccgccactgtgcccactctcggactgggcagcgggcggccaagtaccatgtccgccagcccgccctgccacaagggtcgctggcttgccgcggggtcttgggcttgcggcaagacggccactctggcccagagccgtcgcgacaccaaggtcccgcgggcaggaggcgcgcggggcggccgaaggcgcactcacctcacctcagtgctgcgcagcctcgggcacgaacagccgcctagcgcaccctcatggcgcccggcgcccggcggcgccaccagcccagggtggacatctcccgcgcctcccaaacctctcctcccgcagctgcccagacttctgcaccgaggtgcagctcgacgcctccttgtcagggcttctccgcagaggcggggcttctgtgctagccaatcagcagcctcaccgccctctccgggccccctcaccacagccctgtgacgtgccaatcaggctgcggttgccacagcaacagtttggcgcgaaggctgggggctgacgtcagggagtggccgtgagggaccccaaagccaggtctggaaaaggggggtgggttgggtggtgggggtgcagcccccaaagaaatgggggtcgaaatggaggaaaccccactgagatgctcaaatgtaaaaccgctgaagaataaagggacaaatgtacacatctgtctaaatgaaaaaaatgaaaatcctggccgcaaaaacacatacattaacgtctaaagacctgcagggaagacaagacttttccgcctgggacacatgaaagacatcgagctaatttccttaataaatgaagagctcttggaaaccaacgagataaagaccaaaccaagacagaaaaatgggcaaaagggataaaactggcaattcgcaagaaaatccaaacggctggccgacctgcgaaggaaacatcacgacctgtttgcataaagaaatgcaaacctgaaacaccgggcacgtgcggtttaggggagcgggcagtctcacacactactgagttgtttcccagcagccgtcaatacagaccttccactgcgtaagcccactgcattgccatttaataaaacagcaagaaaatgagagagaaaaataatgaggtagaattgtatgggattattaaggattgaattctcagtagatttagtgaaatatacaagttactgaagtttgtagaaacgaactggtaagtgttttctcatttatttgttttttaaggataaacccaaatataggtaaaactgttggaaaggtaggcaagaaattgttgatgagttacttctagggacaaggaatgtggggtggaagagggatttttcccttctgccatccatactgtgaatttccttggcagaaatacgtatttcttctctggcagtaaaatcaatgaattactaaaagttcactaatgtactctttggtccaactattccactctcaaggaactaaaaaagcaaaggaaatacagggatatacagaagattctatacagggatattcacggagcatcatttttatcaccaaaaatgtgctccacagaaaagaattaaactgtattctggtaaatttacacagcgcgattttaactgactaataaaaatgctgtatgattttaactttaaaggaaaaaatctgtaagatgtggttaattaccaaaaggtgtttacctaaggagcacacagactttaataccccaaattaaactttatattatactcaaggagttatcagtggttgcttgctacactgagaagctgctttatgtgttttagactccctagaccatcaacagtctctttttgcccagcagtgccacataaacataatatacgaatgaaaacactgtgcttcttatgaaaatacacgttcaaaacaaattccccagcaggaatattgaaggtgaatgtggtagtaccctgacttaggttacagattttcaaatctggctactctcattaggctcacctggagagctgttaaacaatgcagattcccagtgtcccacagagatctttgtttttcaggttcccaagggatcctaatgtctagttaaggttttgtaggtgattttaatatattttaaagactccatcatccccctgtctcctcaaaggcctctatctgcaataccagtttctctccggatcctgaatcattaatttccacaagacaccacatgctctcagagctcctgcagttaccacccccttgctcagcacctcttggccctgaaaatgcctcttgatagagcagtctactgtcactaactcaatggttttaccatacattctctcctgctaacatatatgccccacaggcttccatcccttccaaacccactgaaattgcttgacaatttcagcaattccttatgtggccaagaaacttgctcttaatctcactttatctctcagtaatattcaacatcctcattaaaacaagcaaacaaaaacaaaatcccatgcatgctatcttatttttggtgacaattacatggtcctggtttccgctcccctgccatcagtggtctcttctcagtcataaatggcttctgctctgcttgccatctacacgctggagggtcttgcctcagaacttagtcactagtcttctccatcaatgtccactccctaggtaacaacccttccctcctcacctagtcacataatttaaatgccacctacatgccaatggctcccaaattccaatcctctgccacaggactgtccacaaaagcgcagtcttttgcttagaaactgactgctccccttggatgtctatcaggcaactcaaagcattttaaacaaatattaatttcccctttccccatttctataaacagtaccagttgctgaagccaaaaaacaaaaacaaaaaacgacaaaaaaaaccctcacgattgttctcgttccttttttccttaccaccaacatccaatttatcagcaagtcttgctgaccctatctaaggcaaatcccaaatttgtcccatgatttccctttccatggtagtcctaagaaacattatcttcctacaaaaacccttcttccattccaaacccttcctccagtattctccacacagtattaagggtgatcttgcaaagcaaaaaagatgtcaatgttccagcttgaatgacctcctgcccccatcccaattgcatttaaagtccaaaagcccaaaattagaagagccaacattatcttttgtcttagaggacaattaaatataggtgttgtaaaatttcacaatctcttccttcaatgcctaatttaagaaattcttccccacactgatgtcataaagatattcaaatagctgtgcattttagttttctttatggttatttttgcctatgttctgtgttagggatctaattttcccctgactttgtatcatatttctctatatgagcaggtctgtgcttgaactctcttgttggtcccctgatccatttctctatctctgtgcattaacgcaccatattattacagctttacagtatcttggtatttgaaagggcgacggccctaccttgtttttcaaaagtgtctggccctaccttgtctttcaaaattatctgactcttagcccaccatctttcaaataatttttagaagcagcttttaaagtttgatgaactatcctattgagattctgacattttattaaatccacacagcaatttagagaaattgaaaacattatatcaagatctctcatctttgaccactgtctatatctcttacggctgtcaatgatacactgtaattttttttccctataaaggccttatttgactttaggaggtcctttttttcccccattaattgtataattggttatttaatagtttcagaattacaaaaaagttgcaaagatagtacaaaacttccccaccctgttttccctgatgttaataccttacataaccttgctactttgtcaaaaagaagagataatattaacactaaacaaactacagactttgttttgatttcacccatttttccattactatcttccttctgttccaggatctcatcccagacacagcattacatttagtgattacatctccttaggctccccaaggctgtgacagcttctcagtattttgtagaatactcagtttgtttgatattttctcacaacttgatttgggttatgaatttttgagaagagtatctgctattgcctttttttttttttttttttttttttgagacagagtccggctgtgtcgcccaggctggcgatgcaatggctcaatctcagctcactgcaacctccacctcccgggttcaagcaattctcctccctcagcctcctgggtagctgggattacaatcatttgccatcatgcccagctaatttttgtatttttagtagcgatggagtttcaccatgttggccaggctggtctcgaactcctgaccttgtgatcagcataccctggtctcccaaagtgctgggattacaccgcacccggcctgctattgctttttatacgctgactttggatccagtgaacttgttgactttttttttctacacaaaaaaaagttcctgtatttttaaaatgttaacatgctaattaatgacttcatttttactttcggagtttcaccatgttggccaggctggtctcgaactcctgaccttgtgatcagcataccctggtctcccaaagtgctgggattacactgcacccggcctgctattgctttttatacgctgactttggatccagtgaacttgttgacttttttttctacagaaaaaaatgttcctgtatttttaaaatattaacatgctaattaatgacttcatttttactctcattgacaatcatacctcacttcattaacataatgcattggctaggacttctggggtgatattgaacaagtcttgtcctatatttgaaaggggatactcttatctttactatgaaaggggatactcttatctttactatgaagtaaaaacattcactgcaggcttgttttgtacagcctctttattgggggttaaggaaattgccttaagttctagttttttaaaaaaatttatcataagtttaattttatataatgacttctctgcattcattgggaagattgtattatttaacatcatctgatgattggtgaataaagcaggttttatgttgaaaactgtattcctaaaccctgcttgatcatgattatgtgtatctgattcgtatacacatgcagctgggtactactgagttatacttttttattacactatccttgtctggttttgctaccaaggttgtaacagccttatagaatgatttggattgttatctcacttcttatattctctaccatagtttataaactcctctccattggaaattatgtccctttttctattactaatattattaatctctccatgtttctccatcagttttgctaaagatttgacagttttgtctttttaaaatgacttgattttgttgaccatattcttccttcttttccatgtaattaatttctgttctttttgtagttctttcttgttcagttctgtatttcattgtttccattagatttcctctttgcgacatgaagaaacgtctttaggggtcaaagatcttggggaaaaaaactatcttttgaatacagatttccaaattaattgcattatactcatatagcatggcccatatgctactatttcacatttgtcaaagcatccttggtgatcttaagatatggttaattttaattgttcaatatattagaaaagaatgagtattgtctaattgttaggtatcaatttctatttatgttcataggatcaacttgttaactgtgttcagatttttagtattcttggtaattttttgtctgcctgatctatctgttctagatataataaaatctcccaatattcctatggttttatccaccactccttataattaatagtttttgctttatatatatatatttcaaggctatgtttttaggtgcaaacaaggccatgactctttgttgagaaacacagggaagttaatctgcttacatttttaattattgatgtatttgtttaatatgcttttggtcatttattttctcctttcctgcattctactaaattgatcaagttttctttagtcccctttcttccttctgcttatttgggaggtttcaattatatttattacttcactgtctatctttaagttcctaatttctacataagcatatatttttttaacagactataaagtactaaagcaaacatgttggcacacgttagcaattcactggatttcccattcccaccttcattaatattgtctagaattttaattatacctgttttaaacaaatgaaaacatttttacagtcaatgattaattatatttactggtatttcaagaatttattcactcattcttgtttcttgaatctcactcctcgtccctcgaggtttactttttctcattgcaataaatccttaaatgtgtctttaaataagtgtataaggtagtctatttgtatttctaaaaatgtctttatgagacatttttgaatgacattttagccaggtatggaattcttaggtaacctttatcttctctccttattttgaagatattattccattgtcttctaacaaacctgatgaggaggtctgcatcagcgtaatgttcctttctaataacgtctagtttttcccgcggtagctttcagaatagatgttatgtatagatttttgtttatcctgctcaggattgatgtgaccaatgaaggtctttcttccattctggagaattcttgggccagtgtttctttaaatagaacttttctgccattccatttctactcttttcaacctataaagtataatgacccgtcttaatccatcctccatttgtctcaatctttctgtttttcatactgttttctgtgctttctgagtaacttctctttttaactgcatctggtaatagcatttccctagatgttttaaatacagtaactatgttttctgttctatgatttccaattggtactttttttatatctacctttctcaaatggatgaacattttatggacactattctttatttcttcaaaaatcgtaaagtcacactaacactatttgaattgcattttgaaaggactgaattcatgtcttgattgctagttttgctgtcttgttcattttaagatttcctaactttaacccagtgctttgcaagtttagtttctaagtgtttttcctatgggttatcttttcccctcctctctgaacttttcttccctccatgtctttttggctgtctctacctcacccatgagaagcacagtccagagacaatcttgtattgtcaactggggattttgtgccatgtgacaaaaggggtgtattagtcactgagcaagattaaagcttaggctgggtcctctctgcatggctttgttttttcaccccctgccaccactcgtaagtaaaaaacctgggtatccatcactgtttgttgttgttgttgtttttccaggctccttttatgtcaggagagtccaaatccagtacctgtttgccacaatgagcctgggacctcaacatgcatggagtgcttccggacctcattacccaagagcagtcagatttttaatttcctctgcctttttcaagatcattagttcagaaggtttatgttttcaattccacatatccttgcatttttctttcaagttttgacccatatggatatcttaaatattcctattattgcaagtttatattaaaaggaggttaaattgtgaactcacaaactcatagcatcatagcaccatctcaatcaaaagtattatcttctgtgaactacaacagttttcacttctttcgcaagtgtggagtgacgtttgcctgaggctgtatgacctgtgatatcatgacaaattgaaggccaaagcagatgcgaatccagctgttttctattaagtcaaatgccaaggagatttacaaagatgtaaaataatgcgcctcttctcaataacctttggttttgaaaattgttatttttcataaaaaatgttgcttccattaacctgtaataggtttactaccattattttaaataaaatacacatttcaaatggcttaattttttcttaagatataattgataagtaaaaattgtatatatagtgtacaacatggtgtttcaatatacatatacattgtaaaaggatatcaagctaattaacatatctatcacctcactatttttgtgtgtgaagaacacttaagatctactctgttagcaattttcaagtataaactatagtcaccatactgtgcaacagatcaccaggactttttaatcccatctaaccgaaattttgcaccctttggccaacatcagctcatctcctctgacccctgacaaccaccattctactctctacttgtatgagttcaacttttttagattccaaatataaatgagatcatgcagtgtttgtcttaccgtaatgtcctccaggtttatccatgttgtcataagtgacagcatttccttctttttaaaggctggaaaagtatgccattgtacatatattcattttatttatccattcatcaatccatggacaattaggttgattccacatcttggctaatgtgaataatgctgcaatgaacatagaagtgtatactgattttgtttagatatgtagccagaagtgagattgctgggtcatacggtagttttactttttttaaatgaatttccatactgttttccataatggctatattaatttacgttcccaccaacaatgtacacaggttccctttctccatatctttgccaacacttgaagctttttagtttgattcaatcccttttgtctatttttgctttttctgcctgtgcttttaaagtcttatccaaaaatcattggtcagaccaatgacaagaagtttcttccgttacgttttctcccattagtttcacagtttcagctcttaagtctttaatccattttgagttgattttgtaatatggtgtgtctaatttcattccttcatatatggatatctagttttccccacccacttatttaaaaaaaagtcctttccctgttgtgtgttcttgacacttttgtcaaagattgactgactataaattacgggatctatttctgggctattttgttctattggtctctatgtctggttttatgccagtatcatgctgtttttattactgtagctttatactcaattttgaaatcaggtagtgtgatgcctttccagctttgttctttttgctgaaagtttggttatttggggtattctgtggtttcttatgagttttaggagtatttttctatttctgtgaaaaatgacactggaatttttttatggaaattgcgctgaatctacacatcactttgggtagtatggagattttaacaatagtttctaatccatgaacaccagatatttttctatttgtgtcttcaacttctttcatcaaagtcttatagttttcagtgaacaggttaattttattttattatattatatatattataaattctggttaaatttattcttaaataatttgatggtactgtaataatttgatggtactgtaaatggaattgttttcttgatttctttttcagatggtagtagtacctggaaacaatattggtttttactgcaactttactgaatttgtttattagtttaacaagtttttggtggcatctttagggtcttctatatataagaccacatcatcagcagagacaatttcacttcttctgttcgaatttgtatgcctttcgtttttccttatcttgctcctgatcttaaaggaaaacctttctgtcttctaccactgatagtgatgttagctgtgggcctgtcatatatgacctttaatatttcgaggtatgtgccttctatacataatttgttgagtttttatcatgaaaggaagttaaattttgtcagatgctttttctgcatcaattgaaattatcacattttctatgcttaattttgttaatgtggtgtatcacatttacttatttgtgtatgttgaaccatccttacatcccagtgattaatctcacttaatcatagcgtatgatcctttcaatgagctgttgaatttagtttgctagttattgtgttaaggatttttgcgtgtatgctcatcagagatattggcctgtaattttctatttttgtagtgtctttgcctggctgtggtatcagggtaatgctgacctcataaaatgagtttaaaagttttccctcctctttaatttttggaagagtttgagatggctgggtgttaattcttccttaaatatttggtagaattcaccagtgaagcaatcaggtaccaggcttttctttgttgggaggtttttgattatagattcaatctccttactctttattgatctgctcagaacttctatttcttcatgattcagttttggtagcttgtatgtttctaataatttgttcacttctaggttatccaatttgttggtgcatacttgttcatagtagtatcttatgatcctttgcatttctgtgctatgtctcctcttccatttataattttataatttataatttattttataatttataatttataattttataattttgagttttttcttagcctagctaaaggtttgtcaattttatcttttcaaaaaaccagatttcactattatgatcatagtttcgttgattttttctattgtttttctattctctatttcatttatttttgctctgatctttatctttccctctttctctagattttgggcttaatttgttcatctttttctagtttcttgaggtgtaaagttaggttctttgagatctttgtttttcttaatatagaatttaacactataaacttcccttttagaattgctttctctgcatcccacgttctggcatgttgtgtttccattttcatttgtctcaagatattttttatttcccttatgattttttctttgacctactggttgttcaggagtgagtgtgttaatttccacatgttgttttccaattttcctcattattgatttctagtttcataccattatagtcagaaaagatacttcatatagacatcaatcttcttaaatttgttaaggcttgttttgtggcctaacatatgatttgtcctggagaatgttccttgtgtgcttgaaaagaatgtatattcttctgcagttagatggaatgttctgtatatgtgtgaggtccatttggcctacagtattgttcaaatcttattgttttctgcttactctatacattactaaaagtgaggtactgatgtggtttcgctctgtgtccctatccaaatcacatcttgtggctcccacaattcccaagtgctgtgggagggacccagtgggagatagctgaatcttgggggcaggtctttcccatgctgttctcatgatggtaaataagtctcacaagatctgatggttttgaaaatggtagtttctctgcacaagttctctttgcctgccaccatccacataagacttgacttgttcctccttgccttctgacatgattgtgaggcctccccagccatgtggaactgtaagtccattaaacctctttttcttcccagtcttgggtatgtctttatcagcagcttgaaaacagactaatacaataaattgtaccactagagtggggcgctgaagagatacccaaagatgtgaaagcaactttggaactaggttaacaggcagaggttggaatagtttggagggatcagaagaagacaggaaaatgtgggaaagtttggaacttcctagagacttgttgaatggctttgaaaaaaatgctggtaagtgatatgaacaataaggtccaggctgaggtggtctcagatggagatgaggaacatgttggcaactggagcaaaagtgactcttcttatgttttagcaaagagactggcagaattttgtccctgccccagagacctgtagaactttgaacttgaaagagatgatttagggcatctggcggaagaattttctaagcagcaaagcattcaagaggtgacttgggtgctgttaaaggcattcagttttataagggaagcagagcacagggaatgcttccagtttttgcccattcagtatgatattggctgtgggtttgtcatagatagctcttattattttgagatacgtcccatcaatacctaatttattgagagctttttagcatgaaggttgttgaattttatcaaaggccttttctgcatctattgagataatcatatggtttttgttgttggttctgtttatatgctggattatgtttactgatttgcatatgttgaaccagccttgcatcccagggatgaagcacacttgatcatggtggataagcttcttgatgtgctgctggattcggtttgctagtattttattaaggatttttgcatcaatgttcatcagggatattggtctaaaattctctttttttgttgtgtctctgccaggctttggtatcaggatgatgctggcctcataaaatgagttagggaggattccctctttttctattgattggaatagtttcagaaggaatggtaccagctcctccttgtacctctggtagaattcggctgtgaatctgtctggtcctggactttttttggttggtaagctattaattattgcctcaatttcagagcctgttattggtctattcagagattcaacttcttcctggtttaatcttgggagggtgtatgtgttgaggaatttatccatttcttctagattttctagtttatttacgtagaggtgtttatagtattctctgatggtagtttgtatttctttgggatcggtggtgatatcccctttatcattttttattgcatctatttgattcttctctcttttcttctttattagtcttgctagcggtctatcagttttgttgatcttttcaaaaaaccagctcctggataaaagttcgaaaaatttgcagcctgacaatgcgatagaaaagaaaatcccattttctgaggagaaattcaagcctgctgcagaaatgtgcataagtaaggaggagccaaattttaatcctcaagacaatggggaaaatgtctccagggcatatcagaggtcttcacagcagcccctcccatcacaggcctggaggcataggaagaaaaaatggttttgggggctgcgcccagggtccccgtgctgtgtgcagcctaggcacttggtgtcctgcatcccagctgctctagccatgactaaaaagggccaagacacagcttggcccatggcttcagagagtacaagtcccaagccttggcagcttccacgtagtgttgagcctgcgggtgcacagaagtcaagaattgaggtttgggaacctccacctagatttcagaggatgtacggaaacacctgaatgtccaggcagaagtctgctgcaggggtagggctctcatggagaacctctgctagggcagtgcagatgggaaatgtggggtcagagcccccaaacagagtccctactggggcactgcctagtggagctgtgagaagagggccaccatcctccagaccctagaatggtagatccacctacagcttgcactgggcacctggcaaagctgcagacactcaatgccagcccatgaaagcagcctggagggaggatgtaccctggcaaagccacaggggcagagctgcccaagaccatgggaacccacctcttacatcagcatgacctggatgtgagacatggagccaaagaagatcattttggaactttaagatttgattgcccagctggattttggacttgcatgggccctgtagcccctttgttttggccatttctcccatttggaacagctatatttacccaatacctgtacccccattgtgtctaggaagtaactagcttgcttttgattttacaggctcataggcagaagggacttgccttgtctcatatgagactttggactgtggacttctgagttaatcctgatatgagtgaagactttaggggactgtttggatggcatgattggttttaaaatgtgaaaacatgagatttgggaggggccaggggaggaatgatgtggtttggctctgtgtccccatccaaatttcatcctgtggctcccataattcccacgtgctgtgggagggactcagtgggagatagctgaatcatgggggtgggtctttcctgtgctgttctcatgatggtgtataagtctcatgagatctgatggttttgaaaatggtagtttccttgcacaagctctctttctttggtgccatccatgtaagacttgacttgctcctccttgccttctgccatgactgtgaggccccccagccatgtggaacagtaagtccgttaaacctctttttcttcccagtcttgggtatgtctttatcagcagtgtgaaattggactaatacaggtactgaaatcctctgactttatttctaggtgtttgtttgtttgtttgtttttgagacagagtctcactctgtagcacaggctggagtgtagtagcatgatctcggctcactgcaacctctgcctcccggatcccggttaagcaattctcctgcctcagcctcctgagtagctgggattacaggcgcgtgctggagatggcatggtggggttccaccatgttggaaccccatgagactttggactgtggacttctgagttaatcctgatatgagtgaagactttaggggactgtttggatggcatgattggttttaaaatgtgaaaacatgagatttgggaggggccaggggaggaatgatgtggtttggctctgtgtccccatccaaatttcatcctgatggggttccaccatgttggccaggctggtctcgaactcctgacctagttatccgcccacctcagcctcccaaagtgctgggattaccggcatgagccaccacacccggccatatttctagtttttaaaatacctaaaactatacatattgataggtataagccacataagcaaaagttctttagggtcctcattttcatgagtgtaaatgggttttgagaccaaaaagcttgagaatctctggtctacagtaaatctgtaacagtctgggttatttgagcagattggatggaaatctgtctttttcactattatgatctcaaggcctagcacaaagcttaatacacagaagtctctcgataaatgattattcagctattgtttcagcaaatatttgagtacctactatcttattaggttggtcaaaagtaatagtggttttcgcaattacttttaatataagacccaatgctaggtcaacttcatggttcattgtaaatcaaattgaaatggcccctgccataacttatttatttaatatgtcttcagagtttcagtccagctgggaagagacattcaataaacctttaaagattatggtaaatgctttaaacaaacaaacaaacaaaaaacccaggatgccgaaatgaggatggttatgtttgtatggtagatacagaatagtcagggatctctgaggaagagaaactaagactaaattttgaaaaagccagcctggggaagaagaagggaagaacatttcaaaaagacaaaacaggcagggcgtggtgactcacgcctgtaatcccagcactttgggaggctgaggcggaggatcactcgaggtcaggagcttgagaccagcctggccaacatggtgaaaccccgtctctactaaatatacataaattagccaggcatggtagtgcatacctgtaatcccagctactactcgggaggctgaggtgggggaatcgcttgaacccaggaggcagaggttgcagtgagccgagatcgcaccacttaactccagcctgagcaacagagcgagactccatctcaaaacataaaaaaataaaaagaacaaaacagcaatatacaaagataataaaggaaaaaaaacagaaaagacatcagagtggctagaggataatgaggggtgtaaaatgaggttgtacaggtattcaaaagccagctcttttggaactgtagattaagaggaagatcttgaacttaatcctaaatgtaatggaggccattaaagatttttaaataaggcctgacacagtgcattttaagatgattcatgttgctctgtggagaactaggggactagagatacttaacagaggaagcaggaagaccagttaaggggcagcaaaggatggcagggctccaaactagtatggtggcagtagagatacgcagaagtgaacaaatacaagatgtactttggaaacaatatagagaaatcttgctgatgatttgtgtatgtgtggcaaagaaaaaagaatcagaaatgagttccacatttctggtttggacaactgggtgcacaggagtgttatttggtgagtaactgagacacaggtttcagggtaagagcataacatcaaaagctatgtgggacatgtaatatttaaaatgcttacactaaagcaagtggagacactgagcagggattctggagaggtctctgccagggctctgaagtcctccacacatagctgatttgttgcatggtcagattaaaataaacactactttacaagataaataaataaaccagttcttaagtatttcgaattcatgtgtatatattcggtgctgctggataaatatcttcagatacaaatttgtacaccgttcctcagtagtgcaaatctaacaaattttccttaaggaaaacttttattttttaactttctcaagtaggagtttcaggacagtataaagccaaacattcatattaaagtaaccaaccctttcacaaaaagtaccactaagtccaaatattaaaagaacagttcccaaaagcaattaattacatacaggattaaagacaggcaaaagaccacctccatcatgaatcagatattataaaaggaaaatatgtcaagtctggcagacagtgttaaggttcagaactaaagttcagcttatatgtccctgtccaaaagggcactggacaccatttctcatgagaagctaaaacattcagaagtcaagctataacatggtaaccaaagtagtacatgtagaaaatgcagggttactcatccactttttgctcaagttggcttaccagccagaaagctctaaccctgaactggcaaaatggtagatgttcatttatccaaccatctaataaacaggtaatgcgtatcaactacattcagacactagagacacagtgataaacaatggagacacagtctctgccttcatggggcttatagctcactgatgaagccaaacaatcaaataagcatataaataacataagtaacaagcaataaatgtgatgaaagaaatattgtgctataacacatatatcagagagcctgacccagactaggtaataaagaaagacattccatgcctagttaacggtgtgcacaaggcttatgaggctggaggagtacagaaacctgtgtagctagaatacagaatggcataagataaaggctacagaagcacagaagagtcagaccctgcaagacctgtaggccatttaacgactggagatcccatacaacccgcaactgtagcacactacaagaatttctcccaggtgagatcggcactcacatctcaagcaggtcccctgaaaaacagcatgatttccacacatactcacatgtcaatgcctaagaacatgaccagaatgataaggagagctactctggcttccacaatgcagatcatcgtgcaggtagagaaaatcatttttatctggttcattttaaaggcccatcatgagataaacctaagaagaatggagaaaaaggcaataattgatataaaagtaaaacatgaatcagaaagcagaaaaacatctggagctaagagatacagatttaacaaagtctaacaataagtaaaatgttcacaaagaggagactggatgaataaattatggcacatacatttaatagaaaaatctacaatgataaaaaagcatgcaaaaactcttatggaacaatcgccaagatacattgttaaatgaaaagccaaggtgttgaacagtaaacacagtatacttcatttattaaataaaaagagaaacacactgtatacatatttgcttctatatgcatggaataacactggaaggatattcacaaaactattgacattggttatctttttttttttctttttctgactcaaacacatcttctgagacactggttatctatagagagggaaagatgggaggaggaattttctcctttttgaatttcaaaccacacaaatatattacctattaaaagtttaaaaaagttaatattcaatatgattttagatgagtacatatgaaaattttaatgaaaaggaacattttcaaggaaaataaaaattagcaaactgactgccaaatgggggggaaaaaaggtaagaaaagccttcttacaaagaatcctgtatgttaaaactttctggtacattttaataatctagcccccacaggctccatgagataaaactaatatttattgaatatttcccgtgtgctatatactgcatcaagcattacatgtatttgcagctcatcctcacaattcctgagataggtgttctcatcacctctattttacatataaggaaactgaagcatatccagtaagtaactccagaggtcagactctgcaaccactatcctacattaattctgtattaataaactggaaaaccttaaagaaatgcataattttctagggaaacaaaattacttgaaatctgtttgactgtaagtgttcttccaatgcctaaggaacaaattattcttagtctgcacagatagttcccaggacattaagaagaaaaagacgagggcttgccaattcattgaactaaattagaagagtggctttcaagaacatatttcctacaatgaaaatgtgttacaagaatagctatcttgtatgggatacttaccctgtgccaggcactggagtaagtgctttataaaagatctgggtgccacttggaaaacaatctggcagttcttcaaaacgttaaacatagagttaccacatgacccagtaattctactggtaggtaaaattaaaacacatgttcacacaaaaacttgcacatcaatgttcttaacagcattattcataacatagccaaaaaggggaaaaaacccaaatggccattagctgatgaacagataaataatgtatagccaaacaacagaatattatttggcaatagaaaagaacaacgttctaatacatgctacagcatagatgaactttgaaaacagtaggctaagtaaaaaaaggcagtcacaaaagctcacaccttgtatgattccatttatatgaaatgtccagaataggcaaatctatagacagaaaataggtgaatggttccctacggttggaggaagaggggaatgaggagtgaagagtttttttttagggtaattaaaatgttctcagattgagggcagtgatggccatacaactctgaatattactaaacaccactgaactgtacacactgtaaataggtgaattgtatggcagacgaattatatcttggtaaggctgttattaaaaatacatatctaggtgtattttcctaacaaccttaatgaaactgaaactaatatacttattttgtagacgagaaatctgcagctcagaggggacactatctactcatggtcataatctaaatagttgagaaagccagaattcaaatacgagtttttctgtctatactgcttactatctcccaacacaatcctatgcaaatgcactgaaaatcttcaagaaacggcccccctttttcttagaaaacaaacttatgggttgggcgtggtggctcacgcttgtaatcccagcactttggcaggccgaggtgggcggatcacctgaggtcaggagttcgagaccagcctgaccaacatggagaaaccccatctctactaaaaatacaaaaaaaaaaaaaattagccaggcgtgatggtgcatgcctgtaatcccagctactagggaggctgaggcgagagaattgcttgaacctgggaggtggaggttgcggtgagccgagattgcgccattgcactccagcctgggcaacaagagcaaaagtccgtctaaaaaaaaaaaaaaaaaaaaaaaaaaagaaaacaaacttatgactaacaggttcatgaaggcagcctcctaagaacaaataattcatatacagttgaaaatcccaaatccaaaaaaatcagaaatccaaaacacttctggtgtcaagcatttcagataaggaatactcaacctacaatgctattaagcatttcaaacctacaataagagggaagctgtccatttaagaagctagcagatggcttccaagtgcatcttaattcaagagtgccctggagaataataaaaataatagctataatttattaaacttttacaatgggtaaggcctggcaccaagcaccttatgtgaatgattatgtttaattatcataacaacttaataaggtagatgccattattacccaggttttacagatgagaggcaagccttaagaggtattttttcccaggttacaagctaaagggtggcagagctagaaatcaaactcaaatctgttagattcctgagcctcagccctcaaccaccactcagtacatttctaggctattaaatttgaaagccataatgaaatggaacgttcttgaaaggaagggagataataaacacttggcagacgtcaggggagtactttcctcaaaaagttctccaagcctttgccatttataggcaactttcttcacatttccaaagaacaaataattcttatgctttataaattgtgtaaatttcagcaaaaagagacaaaagtgtttcatttgaagaaagcacatggattttcaaccccaaatataccttattttgacataataagaatgtgtatgtaccaggaatgtgtctgagcactttataattgttagcttctcaaatcttcatgacaactatctaaggtaggtactattaataatccctattttacagatgaggaaggggaagcacagagagggtagatgactggcacaaagtcacatggctagaaagtggctaggattaaaaaccaagtcatctagctctaccctccagcacttagtctactcaaccaactctcaaaaaagaatatgctatagctaatatatgattcactggactcctagcactgtggattatcacactgactcccttcacatgtattatcccaactgacaaccaagaaggtaggtaagtttactgcctattgcaagatgaagaccatgaggctgagtgatgtgctaatttgcccaaatacacccaattaacacatatcagaaccaaaattttattaaacccacgtctttctgactctacatcacaccactagtcactgtgtcatgaaatactatggtaggggtcagcaaattacagcaagcaggccaagtccagtctgctgtgtttttatacagttcacacagccaaaatacaaaaattcggttgaatcaaaaatagatgggccaggcacagtggctcatgcctgtaatcccagcatgttgggaggccgaggtgggtggatcacgaggtcaggagatcgagaccatcctgactaacaaggtgaaactccgtctccactaaaaatacaaaaaattagccaggcgtggtggcacacacctgtagtcccagctactcaggagggtgaggcaggagaatcgcatgaacctgggaggcggaggttgcagtgagccgagatcgcaccactgcactccagcctgggcgacagagcaagactccgtctcaaaaaaaaacaaaaaaaacttgatggttgaaaaaaacaaaatatttcatgagaaaattaaatgaaacctaaatttcaatgttcataaataacattggctgtgttttactggacccagacacacccatttatttacagctgctttcacactacaaggacagaactgagtaattttgacaagacatcggtatatcgaacaaagcctgaaatattctctgtttggccatttacagaaaagatttgctgaccctctttgttattatatttaaaactcttattaaaagggaggagtagtgcacaaaaagtaccccccaacccccgaaaaaaggaagaaaaagcatggcctcaaaaggtgactggagtaggaatggaaactaacctccaactttcaaggaacaaataatgtctctgttccataaagtgttccaaggcctagaaaacagtggagggcttcccagttcattttaattaactggttcacagaggtttacaatccctaagctgttttaattggaaagaacgctgcagaatggaaataacaacagctggcagttatggaactttccctgtgctgccaggtgctgtggttaaatagaagatttccatttaatcttcctgacaaccaggaaggtagggtgccattgttatccaattccacggatgaacctgggtcctcgggatgttaaacaaattgccgtatgttccacatagagctcagcactctaaccctcatttctgccctccagagattagtcttaacaccccaccatttacttttattaataaatctgcaaacataaggaaatacataatttcctgaaaaaatataacgtaccaaaagtaactatcaaaataatcttggtgagctgtataaatttcctaccaactcccaggaagcaaataagtatgtgccacaaattgatctgggtcataagaaaacagacaagttttaataccctagctcactgggttgcaatagcactcatctctaactcatcaccactaaaaaaaaaaaaaaaaaagcacaattaaaaaaaaaaccatgcaagataatgatagctaacatttttagctgaactatgtgccagacactaaacactcctcatgcaataactcatttaaactaggaataaatatcccctgcagactaagacataaggaggttaaatggttgtccaaaatcacacaagcgagagggcctggatccaaatccaagccagcaagtgaacaaacccggcatccttaacagactttcagctaataagtctgagaatcctaattatacatgctcaatccagggaaaaaagaaattgacaaaactgagccaaacttaagggcataaaggggtgcgtggtacacctacagctttcaagcaatgtcaacagtctctacgattcactcagcaaagcagttctgaaccaaaactagcttcctctaaaagagaccaaactccacataaacgttacaatatggatgaacttcaaaagtgttctgctaaaggtaagaagaaaacatcataaactgtacaattcagttttcatggaacgtccagaaaagggaaatctcaagagccataaagtggattagtgcttgcctggggctgatcctcaaatgggctcgagggaactggggatggtgggattggttgacgtaaacattctaaaagtgggttgcggtgatggctgtacaactcatacatttaccaaaaaatattcagttgtacactgggtacattttgacgtaatctgcatctccacagaactgtgtaaaagaggctgagtaccccagcaactgcttcttgtcgaaagccatttcctatcctccgcgctaggcgtctcacaggcttttcccccagtcaaatcaatgctaataatcggaaatagcaagttctgagaaacgctagcgtagaatgggcgcactaggggtaaggggatgggccccagacttcagcagccgttctgggaagttgctcgcctttttcgaagactctagctgcaaaactggaagccgtcggtggggcaaggcagagaagagaccacgtctggcggatgagtcctgtgattatcaggtcacctgggtaacgcccaaccacgacgggctgggtctcagcgcgaggcctgcagcccggcgccgactggaatccccagcactgccgtctggaggacatcggcggtatctccccaagagacgggaagtctgtgtgtcgaagaggcgcgggacgcaagcccaccaacctggccgaccccagggaaaggccgagcgtccagcccgcgggggcccaagatggtgccagagttcgaggccctctgtgcatgcaccccgcccgccttcgaatctagcctgttcgccgttgtggtttgtcctcccggttcctctgaaggagttggtcagtagaaccatggcctccattgactacgtcctcagagtcgcagctctcttcagtcgagctccagtcacagaggacggttgtggtgagacccaggcagaagtatttccggtcaacgaggtcgcgggtagtgcgcatgcgcttcgtgcagggccctgcgcaagggcgcctgggaaaccttgcgagaagtgacacacgccctgtcctcagggagcccacggccgactgggaaacaggagaacgggtcaaacgtgggacgtccgtcagctataccgaaaggtctgtgatagagcttggagaaatgtgcatttggacacattatttttacattgtgatctagacagtgaggtaatcttttaaaaaataagttttagaattctattaaatttcagttttagaattatatttaatcatattttgaatattttgaaatattttgaaatttcatacggtttttttgtttttccggtttttttgagacagggtctcgctctatcatccaggctggagtgtagtgatgtgatcacagctcacttcacctcaacttcccaggctcaagtgatcctccctcctcagcctcctgagtagctgggactacaggcacgcaccattacacacagctaattttttttttttttttggtatttttgtagaaatggggtttcaccacgttgcccagactgatctcgaacttctgggctcaagagatccgcctgcctcggcctcccaagatttcgttatgttgtggggaaaagatgtatgattctatgatcagaatgaaagctctgagagggcagccactgatgagtgtaggtgcagtatcctctacaccttgcatggtacttggcatggaatggatgctccttgagtatttctcaaatgactgactggagtctttgaaaaaggcaccctgagttactgttaacagacagattcgctaataattagctactgttaatcggatagattagctaataacaccaacttttgatttgtctcagagtgacctagtgtgaaaagtagggttgcagatttagtaaataaaaaatgtaggataaccctgtcaaatgtgattttcagataaactaagcaaataatttgttagcataagtatgtcccgtttggatatgctgggtgtcctatattttatctagcaacttagaagacatgttaaggtgggggggaaaaatgattgtgttcctcttagaaaaagaactggaggagaaaagaaaacggtatccggaatttgtaaataagtacttccaaacaattctaaagcaggtcagaaaactacacttgagaaactgtgatttataaagttcgtggtaagtgttgtatttatatcatcttaattgaaacctcttacacagtagaacgattatttttattttataagtgcaaacagaagctcagagataggaggttacttgtccaagttctaatattttcactgtcaccccaaaaaatatgtattgaggcctctcggtggctcatgcctgtaatcctagcactttgggagactgaggcaggcagattgcctgagctcaggagttcgagaccagcctggccaacatggtgaaaccctgccactactaaaagtacaaaacattagccaggtgtggtggcgctaccctgtagtcccagctacttgggaagctgaggcaggaggatcgcttgaacccgggagggggtggttacagggagcagagatcacaccacttcactccagcctgggagacagagtgagactccatgtcaaaaataaataaataaataaataaaataataattattatttattgagagctgactgtgtgctgctggtctcggatttctattccacataatctgcctccagagctggaaaattccagtgtctgaccattcctcagcctccctccccttccccactccagctgcagtttccatggtaacaaactgaacctgcttctgtagctaacaagagctaagagtttttgagagggaataagccagaacaactgacgtcagcataccctggctgggggatgggaaggactgcttgaagccctaaagccttctattcctccatcaatggtttatgcaagaattttgtatgtgtcaacatctgtccttggatggagtctctgcaaaagaacaaaaattgtctatgtaaacctctgcagaccccatgaattcataagttttcacttcaggaattgcttcaaacactggtgacataaactttatgcatccttaccatattaaaatgtatttagtcattattcaaccaataatgatggggggcacttctacatatcaaacagtgctagatcccaaggatataattactatcaaaacatacacagtctctattttcctgtttcttagagttcagtggaagagacatttgtttattcttcagtgtattctaaggacccttatgtgtgagacatgtattagggactgggagatacacagatgagttcaaaacaaatcgttgagctgcatggaaatgatcctggtgggattggggtcagacattaaatagataatcacaaaacagcagatatttactgagcagctactgtggtgccaggcactgttttaggcaaggggaggacagcagggaacaaaatagacttggtgtctgttctcatggaacttacattctgatggagagggaaaatatataaatgaattcatttgcttttagttagaagaaaaaggatattaaactcaaattgacttaaataaaaaggagaatttattggcctaagtaactgaaaatgccagagatagaactgatctcatcagtattcatgaacataatttatgttgttgcagatctctgtagtttttctgcccaacactccttccccaggcttcctgccacagaagccttctttcctatggagaactggttagcatctgacctaggcctggtcacttcatgctgttgctatgcccacagtgattggttcaggaatgggcacatgactccaatgggccagtcagagacttactgacctgggacttttccttgggaattatgagaaatatcgttccctttgctgtgatgctaaactggtctgaagtgtgcctggcctatagccatcttttttgcctatctgaataagtcaagaaagagcatcccactgtgtgtttttaagcttctactagataatgcatgtaatgtgcttaacacagagtaaattctcaataaatgttagccagtgttgttagtgatttacaaaggaatgagtgagaagaaattatttgcaggaactgaaagattgtgcttcaaaatgaaggtaaatcaggagggtttttggagtgcatggaatgaaaacatggaggtccacagtatagagcaatgtttcctctgagccacgatgaggttttatgagctgtccagggttcactgaagaatatacttgcctggattcaaaatgcttggaccaacccattcagacattcactgaccccttccctgggtaagattctgtaaaagagaagatgcacaaggcatgatcatagccattgaggaccttatactcaactggagtagcagggaggtgaacaaccagtaacagtaaggccagaggagtacggggcaagcttcagctccacattcatttacataagaaatacacaggaacatatctaacatgccagccatggtgcgaggtgtaagagatattgtattgaaccaaactgatgccttttttattggaacttataatcaagtgcagtggttagcaaaacttcaggaacagaccagacaataactattttaggcttgtgggctgtacagtctctgttgtaactatgcaactctaccattttgtgtaaaatctgccatggacaatatgtacgtgaatgaacatggctatgttccacattattttgggacactgaaatttgaatttcagatgattttgtcacatcaaaaatactcttctttggatttgttttcaaccatttaaaaatactgaaaccattcttagctcatgagccatacaaaaacaggcagtggggccagttgtagttgctcatgcctataatcccagcactttaggaggccaaagcaggaggatcgcttgagcccaggagttccagactagcctgggcaacatagagagaccctatctctactaaaaatagaaaaattagctaggcatggtggcacatgtctgtaatcctagcactttgggaggccaaggaggtaggatcgctttagcccaggagttcaagatcagcttgtgcaatgtatcaaaacttcacctctacataaatattaaggcttaaacagcagaaatgtgttgtctcacagttctgaaggccagaaacccagcagggctggttccttctgacaacagggaagaaggatctgttccaggcctctcccctagctgctgggggtttgctggcagtcattggccatcattggcctccattggccattgccctgatctctgtcctcatcttcacattgtcttctcctgtgtacacatctgtgtccaaattcctccttttcataaggaccccagtcgtactggattagggcctgtcatactccagtgtgacctcgtcttaatgtcttacatctgcaacaaccctatttctacataaggccacatccttaggtagtctgggggctcagactttaacatatgaatttctggggtggggttggggatcccacagcagcaagtgtgccagcctctttgctggtctccctgcttccactttttcccacttcctttcatttccccagcctaggcaagggtgacctttctaaaatgcagacaggaccaggagcctgctgtgagtcatggggctcactgaggccttgttttttggttttttgctttttgggatttttgtttgtttgtttgtttttgagacacagtttcgctcttattgcccaggctggagtgcagtgacgaggtctcagctcaggaatcaagggaggattcctaggtgtcgtgggccagcgtcccctctgcacgttcagcccatgtggatgttttgaagcttcctctcctcggggggcacaagcttcagccagaaaattcatcccatttgtctcaacatttctgtaactctccaaagaaatttgatcatctcccactatcagcactgtcagttggggtctgtccccaggactccatccatgttgccaccatctctccctgggcatctgctgtggcctcctaaacgttcttccttttctatctagtcaccttccacccgttccacacacacacagtggccaaaaagaaagcctcactgtgtaatctcctgcccctgctccgggtaccccagggctgccgcccatcagggtaaagtccaagtggccaacatgatgcctcgggccctccaaacccaaccttgccagctggcccagcttcacctctctctgctcccatcctgggtctccatgctgcggcagtaatgacaatcttccagttccctgcggaggccacgtgccctctgaggagctggctgtactcactgtccccatagactcatttctcccctcccattttctcctcagttcactccaaccaggatttgctgccactctacaaaatcttctcaagatcaacaataccctctgcctgaccaacatggtgaaaccccgtctctactaaatacaaaaaattagctgggcctggtggctcttgcctgtaattccagctacttgggaggctgaggcaggagaatcgcttgaacctgggaggcagaggttgcagtgagccgagattgcgcccctgcactccaacctggacaacacagcgagattccgtctcaaaaaaaaaaaaaaaagaaaaaagaaaaaacacacacacaagaaaacaaaaaacaaacaaaaactacatcagacactttctaaggattaggaatgtattggttaaaaatcaggtgaggcagttgtctctggagatgatgtcttaaaattaaaacatgaatggaaacccaatatggtctacccatacaatggaatattgttcagccttaaaaaggaaggaaactcgggcacttcttacaacatcgatgaacattatgacattatgttagatggaagaagccagtcacaaaaggacaaatactgtatgattccacatgaggtacttagagtagtcaaattcatagagatagaaagtagaatggtaagtgccaggggctgagccacaggaaatggggagctgttgtttaatgggtacaaagtttcagtttttcaagtagaaaagagttctggggctggatggtggtgatggttgcacaaagatgtgaatgtatttaatgtcactgaacttgaggattaagctctgattcttttatcttgcccaaattcctatgtaaggggtctgggaagtcatgccctacaaaccataaattctcatcagataggttttgtttaaccctatatattgtaacttactttctcatctgactccggcataacgttacgtgatgaagaagaaagtcaaaatattttaccccaaacatgtttctttgccatgttttgaaatggccattgaaagctgtcctttgtgggggaaaattcgcatctgtaaagaatctctataaacatagctagatctttttcttctaggccttcccaatcctgaggagattaactaagagtctagcaccttttaaaggtctgaatatgaaacatttgtcatctattgtgtctaagagcagccactataagacttcaaaagaaccctggggccaggcgcggtgtctcacacctgtaatcccaacactttgggaggctgaggcaggcagatcacctgaggtcgggagttcgagaccagcctgaccaacatggaaaaaccccatctctactaaaaatacaaaaattagctgagcgtggtggcgtgtgcctataatcccagctacttgaggggctgaggcaggagaatcgcttgaatccgggaggcagaggttgcagtgagccaagatcatgccattgcattccagcctgggcaacaagagccaaactccatctcaaaacaaacaaacaaacaaaaaaaaccttgtccacaatcttttatcttaacctgaacattttctttctgtagattccaactatttagacaaactcaaccaattgtcaaccggaaaatatttaaatttacctatagcctggaagcaccgcccccatctcatgcctccctaaaatgtataaaaccaagctgtaccccgaccgcctggggcacatgttctcaggatctcctgagggctgtgtcacgggccatagtcactcatatttggctcagaataaatctcttcaaatattttacagcattggactctttttgttgacaaactgtacacttaaaaatggttaagacagggccaggcgtggtggctcatgcctggaatcccaccactttgagaggctgcagcaataggatcactggagcccaggagttcaagaccagcctgggcagcatagtgaggccccatctctacagaaaattgaaacctgagacaggcatgatggtgtgtgcctctctagtcccagctacactcagaggcagcgagaagattgcttgagcacaggagtttgaggctacagtgagctgtgatcacaccactgaactccagcctgagtaacgagcgagatcctgtctccaacactttttaaaagcaagggttaagatggtaaattttatgttatatatctttttttttttttttttttttttttttttgagacagagtcttgctctgtcacccaggctggagtgtggtggagtgcagtggcacaatctcagctcactgcaacctccacctcccgggttcaagcaattctcctgtctcagcctcccaagtagctggaattacaggcacgtgccaccatgcccagctaatttttgtatttttaggagagatggggtttcaccatgttggccaggctggtcttgaactcctgagctcaggtgatctgcccacctcagcctcccaaaatgctgggattataggcatgagccactgtacccagcctgtgttatatatcttttgccacaattaaaaataatttttaaaaattaacacataaataggccgggcaccatggctcatgcctgtaatcccagcactttgggaggtcgaggcaggtggatcacctgaagtcaggagttcgagaccagcccgtccaacatggtgaaaccccatctctactaaaaacacaaaaaattagacaggtgtggtggtgggtgcctgtagtctcagctacttgggaggctgagacaggaaaattgcttgaacctgggaggcggaggttgcagtgagctgagatcacgccattgcactcaggcttgggcaacaagagcaaaaccctgtctcaaaacaaaaaccaaaaaaacagaaaaaaaaacacgtaaataaatgacacctaccttgtaagctcatcctccatgctgggaacacgtttttgcctcttggcttggcttcccaaagagtatattaccccagagtttcagagatacacacattctagtcctcacctaagctaattccattccagtccaactcttccacttttaaatggcccccttgtaggaacatccacatcactcatctgggaatatcatcatttggcaatttaatgatctctaggcaaagacacagtagagattttacccactggtgtggcttggaatgctgcctgtggtggctcagtgctgtgctcaacttggcagaaccagagtgatgtttcacagagtccactttctgttatggttctcggctgggcttggccaccagaggtgtttgcctgggatggagaacgcatgggtggagcggcagctgtgtgtgccctgtgtgtgtgcgtgtgtgtgtgtgtgtgtgtgtgtgtagaggttacagttgggccaggtgctatgcagctcatgcacgtccctgccagctgctggctcaccttgtgtatgtgtgtgtgtctgtgtctgtgtgtgtttagaggttacagttggaccaggtgctatgtgtgtgtgtatgtgtgtgtttagaggttacagttggaccaggtgctgtgtgtgtgtgtgtgtgtgtgtgtgtgtgtttagaggttacagttgggccaggtgctgtgtgtgtgtgtgtttagaggttacagttggaccaggtgctgtgtgtgtgtgtgtgtgtgtgtgtgtgtgtgtgtgtgtgtatttagaggttacagttgggccaggtgccgtgtgtgtgtgtatgtgtgtgtatttagaggttacagttgggccaggtgctatgcagctcatgcacgtccctgccagctgccgcctcaccttgtggctcatgggggcattcccagctcccactgaaaccacctttgcaaaaattatatcagtgagaaaatgttggcatggaggagagctgatctagccaatcttcctcttgcctttagctttcaagttaccttaattatcactgggcttaggctgagctaactttgagagatatttaggttatagtttaagtaataacatcccttccccaaaactcaaccgcctttggaaagccaatgagagaccaccagagtaagggaggggggaagactgaattctgctaaggtgtagacttaaagattgccagccattattctggaggtcctgcaggtaacattgctattgtggactggccttttgagatatgttttcaggttttttgcatgtctgacacccatgactccacctggacccatccacgatggctcctgtggccctacccagaaccaactcaacataagaggatggtttcaactccctataatttcacctctgacctaaccaatcagcagcaaccattgcataaccacccccgccccttatcccaaactacttttgaaaaacccccaacctacaagcctttgatgagattgatttgagtaataactccatcttttgtatggcgtggctggcctcacgtcaattaaattgtttctttactgccataacatggtctttatttgtgcagcagacaggaagaaacttttgggtggttacaccactagcttctcctgggctgtttgcatgtttttagctcacactgaagggctccagggtctcctgcaaaatgccccatccccacaggccatgagagactgatggaggttccaattcatctccgtgggtgctggcaagacctcccagatccatttgcacttgttcttcttcactttcctttctcaacggcagcaccagcaccaaacataggttccagggctaagctcgactgtcgagccacctccacggttgcagaaggtcaagtccctattttaaaacaaaagcagaagaaatcctcatgccacatcactcctagtgattccaacacctcggattggaccctgtgccagatccaccatctttttctcaatgtgtcctgtacgtccagtccaggtctctggtcacgcatgaatcctgctttcactggacgtttccacttcggtctggttccagttggtctcagtcccttgactccaaattctgaattgtttctttttcagtgttaatcagatgtgctcgggatgccagcacccacccactcaccaggtcagaagtctgggacgtcttgggtccttctgcccccctcaaatccatcacttgcatctccaacagaaaccttggtttgtccacacctgtctctcactgcctccatccccatgccaccctccttagctgccgagcttctgttatctcttccctgttcaagaatgaccatttccttgttgtatctgcttcctcactgcccctttcccatacgttcatcacatacagccaaggtcacctttccaaaaaacatactggccatgagtacattgggctgcctgggaagagccagaccccagcaggaagctgcagaaactgtcaaggcaggcaagacacagacctcctctgtccccactctgagtaggagtaaggagggaggccacagaaggtgagtcagggtgttgccaggggaggctgcatctgcttgtccccctctctctcctctgtctgcctctctaaagacctcacccttctcagggagtaggtgcggcaaggggagaaggcccctgagatgctcgtgaccctgacctgctgggtcagccttttttccctctctggaattgccttttttcttctcagagggtggaggcccttggctttgcctgaaattctttgcttagtcactgaacacataaacctgttccctgtcagtcaccccaggcagagacaaagctatagttcttaagtgctcctgtctgccccaagttcagccagtcagcttcctatcgctgccaattttacctcatttttcttttttctttattttattattattattgttttttgcgatggagtctcactctgtcacccaggctggagtgcaatggcccagtctcagctcactgcaacctccgcctccccggttcaaatgattctctggcctcagcctcccgagtagctgggactacaggcgcccaccaccatgcccagctaatttttgtatttttagtagagatggggtttcactatgttggccagggtggtctcaaactcctgactttgtgatctgcccgcctcggcatcccacagtgctgagattacaggcatgagccactgcgccccggctgtttttcttttttgtgatgagaagctttatttataataaccgcaaactgacaacaacccaaatgttcatcagttgattaaagaagttgttttgtatttttacaatcaatattcctcaacaataaagagtaaactattggcagatgcatcattatgcttaaatccccaaaagctgggtgtggtggctcacatctatcatcccagcactttgggaggctgaagtgggaggatcacttgagcccaggggtttgagaccagcctgggcaacacagggagaccccatctctacaaaaatatttaaaaattagctgggtgtggtggagcatgcctgtagtcccagccacttgggaggctgaggtgagaggatggtgtgagcccaggagattaaggctgcagtgagccatgattgctccactgcactccagcctgggcgacagagcaagactccatgtcaaaagaaaaaaaaaaacaaaacattaaaatgaggtcattatggtgggtgctgatccaataggactgctattcttattagaagaagaggttagggcatgaaaagatcacattctttcaccactttcttctaaacaggcttcctccctcccacccatgacacagctgtgctcaaaatctactatgttgtcagatccaacagtcactcctctgtcctcaggttatgtggcttcactgtggcaatcaagagagttgacctcttcctccttctcaaaaacgctttcttcttgtgccttcatagaccctctatcctgattgtcctggccccaccttcttccagctctccttcttctgcttgtaggtactaaagctgaaagcgtgcacaccctctgaccccgccattcttattcagggagcccagatgaccactccacaaatgtgcactgagcgcggaataataataattgccaatatgcatcgagtgcccacattaggccagtcacgcgccctgtccaggaatgcatttagacgaacaatttatatctccttcacgtttcacagagctgacagtctcatggggccccaattgtcaaaaaagttgagaataagcaagttctcacaagcttgggaaaagatggattagtcagcagccagggaaacggagctatcagaatcagttttaaagtcgtacaactgacccgtggcagcctgcctcagtgaacgcgcctttgcacgccaaacaatcatttggttaggagggactcactctgatacacacgtctctgagtgccaaccaatccacaagggtcccactcgagaaatcacggtcctgcagatgatgtcagccccttgatgtctatgaaagccccacaacctctgaactccacattgccccgaaaccctccataaaaccagaccgttctgcacagagagactgtctggttagcagagctctctctcctttattatggtaagaaatcaattcaggattgttcttttatttcagatattgaattgtgttagcttgggctgccatgacaaagtaccacagaccgagtagcttaaacaacagaaatgtattttctgacagttctggaggcaaaaagtataaggtccgggtgttgctggggttggctccttctgaggcctctctttggctgatatctggctgcctttcccccatgtccttacagggttgtccctctgtgtgtgtgtctgtgtcctggcctcctcttcttaaaaggatagcagcatatggattaggactcaccctaatgaccacattttatttacctctttaaagatcctatctctggccaggcacagtggctcacacctgtaatcccagcactttgggaggctgaggcgggcggatcacaatgtcaggagttcgagaccagcctggccaatgtgtttgaaaccccgtctctactaaaaatacaaaaattagccaggcgtggtggcgggtgcctgtaatcccagctacccgggaggctgaggcaggagaaccgcttgaacccaggaggcggaggttgtggtgagccgagatcgtgccactgcactccagcctggtgacagagcgagactccatctcaaaaaaaaacaaaaacaaaaaaacaaaacccacagataccactgggtgacagttgtctacagtattcaaaacaatagcatcctatccaggtgtgtggtctgggagcaactggctgtcctatagaggctgggtgtgcagtagactctaccaactaggtgtgtgtaagtgcaatctaggatgttcacacaatgacgaaatggtctaacagcgcacttctaagcacgtttagggatgtacggctgtgtagagttcgtggcaggtgtcaagtaagtagaattcttcccaggaaatttttctttttcttctttttctgagacagggtctcactctgtcacccaggctggagtgcagtggcacaatcacagctcactgcagcctccacctcctgggcttaggtgatccttctgcctcagcctcccaagtaactgggaccatgggagtgcgccaccatgcctggctacattttttttttttttctgaggtggagtcttgttctgtctcgcccaggcaggagtgtaatggcaggatctcgggtcactgcaacctctgcctcctgtgttcaagtgattctcttgcctcaacctcccgagtagcttagattacaggtgcctgccaccacacctggctgatttttgtatttttagtagagatggggtttccccatgtggccaggctggtctcgaactcctgacttcaagtgatccgcctgcctcagcctcccaaagggctgggattacaggcatcagccaacacccagtggttatttttatgttatttaacatattctctatattatccaggctggtctcaaactcctgggctcaagcaatctacccacctcagccttccaaagcactgggattacaggcatgaaccaccatggctgtcccccaggaccttattctaaacacagttcagtatttcccaagcattcttgaatgccaggaactaggctgggacaatagtagtgtgcagaacagactagacatctattcagcaatcttgcttctgggtatacacacaaaagaatataaatccgggtctcgaagagatgtttgtacacccgtattcatagcaccattattcctagtagccaagcggtggaagcaacccaatgttcactgatggatgcgtggatgagcaaaatgtgctctatacgtacaatgaaatattgttcagtcctgaaaagaaaaggaaattctgacacttgctacaacatgaatgaaacttatttttttttttttgagatggagtctcgctgtgtcgcccaggctggagtgcagtggtgccatctcggctcactccaacctctgcttcccgggttcaagtgactctctcacctctgcctcccaagtagctgggacctcaggcatgcaccatcatgcccagctaatttttgtatttttagtagagatggggtttaccatgttggccgggctggtctcgaactcctgacctcaagtgatccgcctgccttggcctcccaaagtgctgggattataggtgtgagccaccgcacccggtcttgaatgaaacttttgaaaatattatgctaagtgaaataagccagtcacaaaaagacaaatactgtatgattttacttatatactgtacttagagtagtccaactcataaagacagaaagtaaagtggtgattgccagggactgagggaagtggtgagtggggagttaatgagggcagtttcagttttgcaagatgaaaagagctctggaggcagatggtgatgatggttgcacaacaaggtgaatatatttaacactgctatctgtacggtaaaaatggttaagattggctgggtgtggtggctcatgcctgtaatcccagcactttgggaggccgaggcgggtggatcacctgaggtcaggagtttgagaccagcctgaccaacatggtaaaaccccatctctacctcatctactaaaaatataaactactaaacctcatctactaaaaatacaaacaattagctgggcctggtggcaagtgcctgtaatctcaggagctactgagacaggaggatcgcttgaacccaggaggcggaggttacagtgagctgagatcaagccattgcactccagcctgggcaacaaaagcgaggctctgtctcaacaacaacaaaaaagtttaagatggtaaattttatgttacctgtattgttccacaattaaaaaacaaaacgggctgtgtctctgctgtcatgctcttgttttcctgcacttcttggaggctgcactctcagtagccagacttggagctctggacctcttggcttgaaacatttccccttgccattccttcctgttctgcctgcacttttcaggacacttcctccaaggaggccctctctgatgccttcctcccatccccttcagaatcggggtagccccagtggtggcttcaccagcctcatgagatccagttttgttcatctcttcgcaactccacattcggtgatatcacattgttagcttcaggtcagccacagtgggaatatttacaccatgggaattggcagactctacaaagcatggttttgttcccttgagagctagttgttaaacatttaccagcccaccatggaatggtcaccccttccgtgctgctcaaacatcctgtcctctctgatgtgatgtctgtcttccctgttagatgataagcttcactaaggcaggggccaggcctgtagctggtgagtggtggaaccagggtttgaaggctcaggggatacaggttgaatatcccttatccaaaatgcttgggaccagaggtgtttcaggtttcagattttttcagattttggaacatttgcatttatgtaatgagatatatcttggggatataacccaaatctatacatgaaatttatttgtttcctttttttttttttttttttttttgaaacggagtcatcttgctctgtctcccaggctggagtacggtggcacaatctcagctcactgcaacctccacctcccaggttcaagcgattctcatgcctcagcctcccgagtggctggaattacaggcacccaccaccatgcctggctaatttttttttgtatttttagtagagatgggtttcaccagactggtttcgaactcctgacctcaggtgatctgcccgcgtcagactcccaaagtgctgggattacaggcatgagtcacgatggccggccttatttatgtttcatagacattttatacacatagcctggagataattttatgcagtatttttaataattttgtgcatgaaaacaaagttttgactgtgttttcactgcaaccctttgcaattttcctcgtgtggcatcatgctggcactcaaacatatcagattttggagtatttctgatttcagattttcccattagatatgctcatcctgtaatggccaccctaatttcagtctctctccctggaaatcaacaagacaataataatgatagaaataatagtcagccaggtgtggtggctcacgcctgtaatttcagcactttgggaggccaaggtgggcagatcacaaggtcaggagttcaagaccagcttggccaacacggtgaaacccagtctctactaaaaatacaaaagttagctgggcgtggtggcacgtgcctgtagtcccagctactccggaggctgaggcgggagaatcacttgaacctgggaggcggatgttgcagtgagctgagatcgtgccactgcactccagcctgggcgacagagtgagaccctgtctcaaaaaaaaaaaaaaaaaaagaaaaagaaaagaaataatagtcatagctgttattatgaattgcagcattcctgtattcctgcagaccttttacctttacaaaaaccttaccctagctcagagtcgtctcctcccacctctccgctggcttcttcagccacactgggtttctttctccctctccaacatatttctctccattgtcttctcacttctcggtatgttcttccctcagatctttgcttgactgatcatttaggcttccttcaacttaaatgtcacttccttgaaggggccttttctgagaacctgagctaaaatagcctcggtcaccctccagtaatgtatgtcgtgctgtaagtggcctcatccccataattaacccccagtctttcatgtggacaacttgtgtctcctcaaagttatttataaagcaatatacaaaccggcttcaagttcctttctctttaccctctgaagtccctcctatgtagaaactcctgaggaaccagcaagttccccagttttatgatcttcattaattattttattgtggtaaaaaccacataacataaaatgtaccatcttaattactttaagtgtacaatttagtaatgttaagtattttcacattattatgaatcaggtctccagaactctttcatcttgcaaatcggaaactctataaccatgaaaaaacaactccccatttcttcctaccccattccctggtaaatcaccattttactttctgtttttatgaatttgactcagtaacttcgtataagtgagataatagcatttgtctttttgtgactgccttatttcacttagcataatgtcctcaaggttcagtcatgttatatcacaacacttccttttttatgctgaatactaatgttccattgtatgcatataccacattcccattgtccatttatctgttgatgggcatttactttgcttcaacctcctggctattgtgaatagtgctgttaggaacatggctgcacacatatctctttgagtccatgttttcttttgggtaaatacctagaattggaattgctggatcataaggtaattctacttttaattatttgaggaactgccataccattttccaaagtggctgtaccattttatattcccatcaatggtgcccaagggttccaatttctccacactgccttctttattatttttttattttttgagacagagtcttgctatatcgcccaggctggagtgcagttggcgtgatcttggctcactgcaacctcggcctcctgggttcaagtgattctcctgcctcagcctcccgagtagctgggattacaggtgcgcaccaccatgcctggctaattttttgtactgtcagtagagatggggtttcaccaagctggccaggctggtctcgaactcctgacctcgtgatctgcctgcttcggcctcccagagtgctgggattacaggcgtgagccaccacgcctggcccacattgccttttatactttcctttttttttttttttttgatagtagccatcccgataggtatgagttggtatctcattgcggtttcaaattgcttttctttaatgattaataatgaacattttttcacgtgcttgtttgtcatttgtatatcttctttggagacgtgtctattcaagctctttgcccatttttgaattgtgttatttgatttttttggtgttaagttgttgtagttctgtatatattttcaatattaaccacatatcagatgtatcatttgcaaatattttctcttattccgtaggttgtctttgcattctgtcaattgttgtgttatttaaggcacaaacattttacatctgatatagtcccatttgcctattttcacttctgttgcctgtgcttggtgtcagatcctaaagcatgtcattgcctaattccatttattttaaaaattttcttgtcaggcgcggtggctcacacctgccatcccagcactttgggagactggggtgggtggatcacctgaggtcaagagttcaagaccagcctggccaaaatggtgaaaccctgtctctactaaaaatttaaaaattagctgatcaaggtagtgggtgcctgtaataccagctattcaggaggctgaggcaggagaatcccttgaacccaggaggtggaggttctagtgagccgagatcccaccattgcacttcagcctgggcgacagagcaagactctgtttcaaaaaaaaaaaaaaattatcttgattctgtttgtcagttcccacaccccatttcatccactccaggagaaaacagacatgtcttcggctcccccggacttcctagaatttaacacagtgcccagggcacaagcatgaaacatacttgctgaatgagtggatgctctgttgccgatgtctgacagaatattatttatagcttacacctgactgtccctaggcaaggtctctgaattcttctggtcggcaccagaagggagggacgaagcttccagaggagacctgcctgccactgccctgtgatggggaacctaagggacaggcagaccttggcttttggtcccccagagagctggctctgtactggggctgggaatctccctgatctttgatttgcagggtgaatggggtggaaccttctgcccctccctccattccccctactctggtgtgcaggaagctgaggccttctaggagactggggatactgaggctgagggaggtagggaggagttaggaggtttttgattctcacttgaatctttcccactgtagctgaaaacagggtttttgggtcacctgccccagcaggggatgggagtataggcggggtctgcgtctgcaaccccctcctgaatgtggaaatcttaacggggccaacacctcccccgttgctggatatggaagcaatgatactttctcccttccagctctgcactccttataccccactgggatagaaatcctgtctgttggtgtcaggcaggggtctccggctacccctcctctgctggggtggaagatggagaggtcaaaggagcaagcctccttcctggcccttgcaagggcctccagcctggcagccggagggattaaggacaagaggcccctggcgtccgtgagtctggcgtggctgcccaggagcctcccaggggagtcagcgtgggccagagggctggaggctcccagatcaatcagaggtctgaaggtcactggagctgtgaccttcaaattaggatacttgtaacccaggaggctggcacacccccacgggggatggggcgcatggttgaagagaatccatctcccagagaggtgccctagggcccccctttcaccatgaccctgctaacactttacagatgaaaagcatacctctctctcaccccctaatcttatcgcagtgaattgccctggggtgaaagaaaagcctctggatcccaaacctagaatcactttgaaatactgctgtccccaacggctccctttatagaggccctgggctgcctttgaggtgcatattttgcaaggttgaaagcaggagggagtgaaaaaatgcctgcatttgcctctgaggtgctaaaggaaaaaaatagctcaatgatgatggatgggcagactttatttgggatcaccgcagtgggtacggggaccactgccataggggcttgcggttggttggtgagagaggttgggttaattcctgaatacagcagggagagtgggaattcacagccaaggagcagggtcgggagcagtggctagaaaactgctaagaggaaacttcagagataagggcgattctggttaaactgaccttgctagattcctgctgaaggcagccccgggtgacaggaggaatccaatcagacatcaaaggggatcagatgtcgacagtggagggttccttctaaactcacttagcagggttcttccctgaaactgggtcttagatgggcctagcacaagattcagaagcctgtctaaagtgtggccaagcctgggcgcagtggctcatgcctgtaatcccagcactatgggaagccaaggtgggcagattgcctgaggtcaggagttcgtgaccagcctggccaacatggtgaaaccccatctctactaaaaatacaaaaattagccaggcgtgatggcacatgcctgtaatcccagctactcaggagtctgaggcaggagaatggcttcaacctggaaggtggaggttgcagtgatctgagatcatgccattgcactctagtctgggcgacagagtgagactctgtctcaaaaacaaaacaaaagaaaacaaacaaaataacgtgtggccaagcaaagagtctttgtcagtggatcagtgtctatatgtcaagtcaaaggaatatattgcagataatatagtatcttctgttttcctgaatgatgatctggatgtgtaggagaaaggctttcaccagctttggctgaagggtggttttgtattgcaactctgtcttcgacattcaataaatactgaattcactgtcagtcagtcaatgacttcttggctagtctcttgctagtttattcctaccaagccttacttcactcaggcaaatggcaatggggactctgttgttgattctctagtaagggatggacatctacaataaatttattatagattgtctctttacttacttgtcataaataagattattatataattattgcattacatatttaattatatgttatggataagattattgtaatataatagtaataacctataatgaatgagaaatgtgccccttttgcaaaccctgcacttacttgtctgatacctttcttcttgaatttcatggaatactgtctcattccagtaataagaaaattcacggaagatacaggcatgacctaagtgttctcaccaaacattttcagagtattctcgcaataaccctttgactgggtactttcagagatcctttttattttccacataggaagagataatttgtctaacagctactgaataaacagatccaagatttgaaccctcatagtttggatgggaatctgagttctttcttttttgtttgtttgtttagacaagctcttgctgtattgcccaggatggagtgcagtggcacaaccaccactcagtgacaccttgacctcctgggctcaaacaatcctcccgtctcagcctcccaagtctcagcacacctgggactacaggtgtgcatcaccacgcccagctaattttaaattttttgttagagacgggtacttcctatgttgctcaggctggtcttgaactcctgggctgaagtgatcctcccacctcagcctcccaaagtgttgggattacaggcatgagccactgtgcttgaccaacccacatctcattcagctcctgcaccatttctcttctcccccttagaactaactctatagcctcatctttacttttgcatttctctatctctcttaacctcattccaatcaagctttcatctataccattttactaaaaggccaccaataatctccacattggcaaatccagtagttgagttccagctgtcataaggacttgacaatttgtcacctgtccttcttcttccttttttttttttttgagacagagtctcactctgtcacccaagctggagtacaatggcatggtcttggctcactgcaacctccacctcctgggttcaagtgattctcctgcctcagcctcccaagtagctgagattacaggcgcacactgccatgcccagctgatttttgtatttttactagagacggggttttgccatgttggccaggctggtctcaaatcccaacctcaggtgatctgcccacctcggcctcccagagtgctgggattacaggcattagccaccgtgcctggcccaacccgtccttcttagaagacttgagtccacactgaattgggttcaccagacctccctgacaattctctcttctggctttcttcctacctcccctgttgctggatatggaagcaatgatactttctcccctttccttctctatactccctataccccactgggatagaaatcctgtctcttggtgtcaggcaggggtctcaggctacccctcctctgctggggtggaagatggagaggtcaaaagagccagtctccttcctggcccttgcaagggcctccagcccgacagccagagggattaaggacaagaggctcctggcatccctgagtctgaccagattgtagtagccagcctccaaagtggcccgcaataatcctcactccctagtagtgctcacagtcttgtggtctcttctgacaccgacccagagctggttcatgaccagctgaggctgagggaagtgtgaagggagagtctaggaagtttttgattctcatttgaacccttcccattgcagctggaaacagcagaacatggaggaagtgatagtgtgtgtgacttctaatgctaagtcataatggacatcgtagtttccacttggatcacttgcttgggagtaggggtaggaattcagccaccatgttgtggaatactcaagtagcccctggagaggtccaggtgcagaggaatcagcttgccagcaccaacttggcaaacttcgagtgagccacgtagattctccagccccagtcaaaccttctgaccacctcatgagagaccccagaccagaactgcccatcagagctgtttccaaatccccaactttcagaaaccataaaagataataaatgattattgttttaagttaatacatttttgcatgatttgttatgcagcaaattgctaaccaatacatattctttctcatattcctttccatgtttttctactatcatgtctcaattctagagtgctccagagttcagtgctcagatcttgtctaccatctggatttgatacctaaatgatcccacacattgctaaactttgcaatagcatctatatattgttaaatctcagatttatagctctagctcaacatctcccatgaattccatcaacccactgtttataggaaatttccacttagatgtcttatagtactttccatcttaacatagctacgagtgaacacctcatctcacctcatccctgacacagctacgtaccctcagtctgcccatctcagtaaatgacaactccatcctcccagctgctcagacctaaggccatttttgattcacagctctgcatatccaatccatcagcaaatcctggttggccctcaatatgatagtggcttggacaataatactgattagattcaggaagaatgttccaggtgaatgctcagaggtagaaccaagcttatgttctccagaaacttcaaggaggctgtggtgggctaaatgttgccttcccctaaaaagatacatccatgtcctaatcctaatattcagagcctgtgaatattgctttgtttgaaaaaaaggtggggaggtgttgtgggagatatgattatgattaagttaaggttcttttgttttttttttttgagagacagggtctcactatgtcacccaggctgagtgcagtgggacaatcacagttcactgcagacttgaccttccaggctcaagcgatcctcctgcctcaacctcccaagcagctgggactacaggcatgcaccaccatgcctggctaattttttttttttttttgagacaaagtctcgctctgtcacccaggccggagtgcagtggctcaatctcggctcactgcaagctccgcctcccgggttcacgccattctcctgccccagcctcccgagtagctgggactacaggtgcccaccaccatgcccggctaattttttgtattttttagtagagacggggtttcaccatgttagccaggatggtctcgatctcctgacctcgtgatctgcccaccttggcctcccaaagtgctgggattacaggcgtgagccaccacgcccggccctggctaatttttgcttttttgtagagacaggtctcactgtgttgcccagactggtctcaaacctgaggatctcaaagcgatcctcatgcctcagcttcccaaaatgctgggattacaagtgtgatcaactgcacctgatcttttaccattttttaattgtggtaaaatagacattacataaaaatttccatcttgaccatttatttacagacacagttcaatggtattaaatacattcataatgttatgcaactgtcactgccacccatctccagaactcttttcatctgtcccccaactgaaactctgtccccacgaaacactaattccccatttcctcttgttcccagcccctggccaccaccattttactttctgtctctgtgaatttcactacttaaggtatttcatgtaattggaatcctacagcatttgtctttttgtaactggctcatttctcctacaatgatgtccttagagttcatgcatgttatagcacatgtcagaattatcttcctctttagggatggataatattccattgtatggatggaccacatttttcttacccatttatctagcagtggacacctaggctgctttcacatttaactattactgtgaaaaaatgccattgtgaatatgggtgtgcaaatatcactttgagaacctgctttcaattctttgaggtatatactcagaagtggaattgctggatcatattgtcattatattttcagattttttttttttgagaaaaagtctcactctgttgcccaggctggaccaaagtgtcatgatcatgactcactgtagcctcaactttccaggctcaaacaatccaaccacctcagcctccaagtaactcggactgcaggtgcatgcagctaatttttaaattttttctgtagagatagggtttctccatgtggcccaggctggtcttgaattcctgagctcaagtgacctgcctaccttggcttcccatagtgctgggattacagatgtgatccacaactcccagcctttttttttttttggccagtttaataggtgacgaatagtatcctattttcttagttcacattttgaaaaatgagcaaagttaattcacctttaaaaattttgtgaggccaggcatgggggctcacgcttgtaatcccagcactttgggaggctgaggcagggcggatcatcggaggtcgggagttcgagaccagcctggccaacatggtgaaacctcgtctctactaaaaatacaaaaaattagctgggtgtggtggcacatgcctgtaatcccagctactcgggaggttgagggaggagaagagcttgaacccgagaggcggaggttgcagtgagccgagatcatgccactgcactccagcctgggcaacacagtgagactctgtctgaaaaagagaaaaagaaaaaaagaaaatgtttgtttcctggcagaaacaagggcagaatctgtctggaggggtataacctaacctagggcatacaggattcccactgataaaaccctagtaaagataagcccacaatccaaaactgcaaacaatgaaaagtccatcctgaatgagggttagtagaacaatcaaacagcaggattagatccccaggaattgcagctaacagaacttctgccagtcatgcattcacttatttaacaaatatttattgagcatgtgctaggttccaggcagtattttagatactttgggtacacaagcgtacaaacagtttacaagtcctgctctcagagagcataattccaacactggatagagactttataaaagaaagttattggaagatcattatacatggtatgcttgtatcacatgtaccccataaacgtgtagaactattatgtatccataaaactttaaaataaaaacataaatatattcaaaatgatccaagacaactcaacaacagcaaaacaacttgatttaaaaatgggtagagaagttgaatagacatttcttcaaagaagttatacaaatggccaaaagcacatgagaagatgctcagcatcgctaatcatgaaggaaatgtaaatcacaacggcagtgagaagccaggcacggtggctcctgcctgtaatcttagcacattgggaggctgaggcaggggaatcacttgaggccaattgtctgagaccatcctgggcaataaagtcctgtctgtacaaaaaaaaaattttttttaattaaaaaattagccaggcatggtggtgttgcctgtagtcctagctacttgggaggtgaggtgggaggatatcctgaacctgggaagtggaggctgcagtgagccatgatcgtgccactgcactccaggctgggtgatggagcgagaccctgtctcaaaaatttatatatatatcacaatgagccattaggttgtggctatatagatttttaaaaggcagaaaactacacgtatatatgagaatgtagggaaattggaatcttgtgcactgttggtgggaatgtaaaatcatgcccctgctatggaaaacagtatgatttaaaaaaaaaaaaacgtaaaaatagaattaccttatgatttagcctttccactcttgggtttataccaaaaaataaaaataaaaacaaaagttgaaaatggactcaggaaacgggtatctgtacacccatagcggcattacacccaataaccaaaacacagacgcgatccaatgtccattgacaggtgcatggataaataaaaatggagtctgtctacataaccgaatattattcggccttaaaaagaaggagattcttatacgtgctactatatggtaaaccttgaagacactattctaagtggaataagccagttacaaaacgacaaatactgtaagattccactcatataggtatctgaagtagttaaattcatagaaacaggccaggcaccgcggctcacacctgtaatgccagcactttgggaggccgaggcggatggatcatctgacgtcaggagtttgagactagtctgactaacatggtaaaaccctatctctactaaaaaatacaaaaattagtcaggcgtggtggtgggcacctatattcccagctactcaggaggctgagacaggagaattgcttgaacccaggaggcagaggttgcagtgagccaagatcatgccactgcactccagcctaggcaacagagtgagactctgtctcaaaaaaaaaaaaaattcatagaaacagaaagtaaaataatggttgccaggggctatgggtaaaggagaatggggagttactgtttaatagttctagagtgtcagttttgcaagatgagaaaggtctggagactggtcacacaacaatggggatacacttaataactcgtttaagatggtacattttatattccatgaattttaccacagttaaattattgaagacataaaaaaaatccaaatatttgaaaacaacaagacataataaaatatcggggatattgaaaaaaaaacctttgttttctagaaataagaatttagtcagtgaaggtgttaaccaggagattagagccatctaatgagataattagtgaactggaaaatagatttaaggaaaccatgtagaaggtggccagggaaaataaagaaattttaaatatgaaagaagttaagagctgtagaagatagaatgagaattctaacatatgtgtatgtaatgcatttcaatttttttggctgcaattgagagaaaccggttaaaatgggctccagacaaaatgatgaagggagatagcttttattgaccccagttacagtcagatccaggtgttgaaagctccttcgccaaattctgctgctttcctgttctctgctttgctttaatctctctcggcctcatcctcaatcaggatcttcccaaccagtggcaagtttgctactagcagtcacaggtttccctcctttccagcttctcaacccaattaggaaaagtaacattttttgttgttgtttgtttgtttgttttttgttttgttttgttttttgagacacagtctcgctctgttgcccaactggagtgcagtggcatgatctcggctcactgcaacctctgcctcctgggttcaaacgattctcctgcctcagcctcccaagtagctgggattacaggcttgtgccaccatgcccggctaatatgttttgtatttttagtagagatggggtttcaccatgttggccaggctggtctcgaactcctaagacttcaggtgatccacccgcctctgcctcccaaaatgctgggattacaggtgtgagacaccgtgcctggcctaaaagtagctttttctcaacaatttcagcaaaagtcgcagttggggctagcatagccttacttagattctgtggccatccctgaacaaatcactgagaccaagaggacgtgctgctctcctgggccagacctgggtccttttccctttcctggagtcagcagggtgggctcagccctgcctgaaccatatgaaaagagagccgagaaaggagccatctcagaagaagcccagtgaagacttggcaggcgaaagtggcacacggggctgggaacatggtagctatggtaagaaaagcaagggacgcgcatgtgttccgatagtgaaatacgcatatcaactgaattcacatccacgtttgtgttttccctcttctctcacatatgtctagtgcagtagcaaatatttttgcctgcttctttctattcaacattcaggaaatgaggctattcttagctcactcttatttggggctttcgaaacatgagacacaattttgtgtattttgcatagattttcttactttaccctgaccacaattctgtaagtccatatgcttttatttttatgttttattttatttttaggttttagagatgggggtctggctctgttgcccatgtggagtgcagtggtgtgatcacggcttactgcagccttgaattcctgggcacaagtgatcctccaactacaggtgtgtgccaacatacctggctaattttgaaaaaattttgtagagacagggtcttgcccagcctggtcttgaactcctggcctcgaacttctggcctcaagcaatcctcccatctcagcctcccaaagtgctgggattacaggcgtgagtcacctgacatgagtcacccagcaggtcatacatttcaatcataattttcacttcactgatgaagaaactgaggtgcagagattaaataacttgttcataggcacacaaaagttaattatggagatgtaattggaactgaggcagtacaattccagattccatcccttaactgccgtagtctgtgctgtgtctctggaattcaattcattttgaagataactctcatccagcaatgcatgacaaagtggaaatgtcccctcagaagtagttccctttggccgggtgcggtggctctcacctgtaatcccagcactttgggaggctgaggcgggcagatcacgaggtcaggagatcaagggcagcctggccaacatggtgaaaccccatctctactaaaaatacaaaaattagctggggctggtggtgcgtgcctgtaatcccagctacttgggaggctgaggcaggaaaatcacttaaaccagggagttggaggttgcagtgagcagagatcgtgccactgcactccagcctgggcaacagagtgagactccgtctcaaaaaaaaaaaaaaaaaaatagaagtagttcccttaaatggtaccaatttgcacattagaatcaatttgttcagtgtgtacgaagcccgtgactttaatggtggtttcctctgggtggtcctagaagactatcctggttacaaaagaaagaagccccatttacttcacctcataccccatgaccaccccacacccataagggttttcagtcagcagacatggccactccatggagcagctggggcaccgctggtctcagagggttgaggatgacagaaacaactcgaactggtttcggcaaagaggggggatttcttggcttaggtaaccaaatctgagggagggaaggggtgtagttgtcttcagggtgatggaatgcagccagcagctgtctctctaccacttgagtctgcatgttggtagtgagctgtcatgcaaggcttccccatgaggtcagaatggtgctattctcaggttatccatctgcaaggagaagacctgcctcccttgtccttagaaggctcttcaccagcctggcttgggtcacatgcccactcccatggccaaggcacccagcatactacaataggtgacctttgtggggatacgggtgagaagaagcagtccctaaaataaaagccagggtgagttttcccgaagcagcagggaggagtgccacacagatgaacccattcatacccaccttgcaccacatcctgtgttgtggggtcttaggaactccttcctggaagaaatagcctgtgtgacagggccttgaaactaagcaggagcttgctgaaaagaggaatgagaggggccaggcgcagtggctcacacctgtaatcccagcactttgggaggccaaggtgggtggatcatgaggtcaggagttcaagaccagcctagccaacatggtgaaagtccgtctctactaaaaatacaaaagaattaactgggcatggtggcgcatgcctgtaatcccagctactcaggaggctgagtcagaagaattgcttgtactggcacccagtaggcagaggttgcagtgagcagagatcacgctgctgcattctggcctgggctacagagcaagactctgtctcaaaaaaagaggaatgagagaggaacgagcatttggcagacatgcagaggtctacagatgagtagtttattctgactggcccgtggaggcggtggtggtggaggtgggtaaggtgaagcatggctgcaggggaggccacagggaactccacaaggcctgaacctgacctcgaaggtgcatgtgtaccttggatgggtacagtggatataaagttttgctcacccggtgttcactcttttatgaacaaaatacccttttccttttggagagcaccctctcccaccctctcagtccatggagcctatgaggcctctctctccagctcctgtgacctctacctggtcaatagaagtcactggctcagggatggacatgtgacccaatctgggccaatgaggggcagccctaggagttttgctagaaggattgcagactattcctgctagcaaaataagaccaatagatctctaattttttttttttttttttttttgagactgagtctcactctgtcgcccagtctggagtacagtggtgcaatcttggctcactgcaacctcctcctcttgggttcaaattatgctcgtgcctcagcctcccgagtagctgggattacagtaatggaccaccatgccaggctaattttttttgtatttttgatagagacaaggttttgccatgttggctaggctggtctcaaactcctggcctcaagtgatccgccctctttggcctctcaaagtgctgggattacaggtgtgagacactgtgcctggcctctgataaaaatttttggggggttgagtccaggtacgcatgaagccaactacccctggacttttcaactacatgattcagtaaacaacttttatttttgtttgtttgatttcgctttagcaatcagcatttctgttgcttgtcatggaagagatgtctctaaacaggagactgatggagttagacttgtgttttggaaggatgtccttcttgggatcggagaatggtatggaaacagcaagcaagagtggagacagccaagcagtgaagaatcaagggcggggtggactagagccatgtcacctgggggatatatcagtgtgagagatgagaaatggatgcacaaaaatggaaaacaagagagatgtggggactcatttatgggcagacgttgatctccacaagacatggtgactatttggatatggagaatacagaagagggatgagtcagggattacttgacaagggcccaggagaggggctttatctgtcatgcctatttcagatgtaagtgatgaaaaataaactcaaattggcttaaacaaaataaataggaatgtaataggctcaacatctgtcaagttcaaggagcttcagtacagttggatccagaacttctaatgattttatcaagatatgacctttatgtctgtgtttccttttttttttttccttgagacggagtttcgctcttgttgcccaggctggagtgcaatggcgccatctcggctcactgcaacctctgcctcccggcttcaagggattctcctgcctcaacctcctgagtacctgggattacaggcacccaccaccatgcccagctgattttttgtatttttagtagagacgaggtttcaccattttggttaggctggtctcaagctcgtgacctcaggtgatccacctgccttggcctcccaaagtgctgggattataggcgtgagccgccacgactggccatgtctgtgtttctcagacctgctttcctctgatgtggtttcatcctgccacaggatctcccctcaaaaaggtaaagatagctgccaacatctcagcacctgggtgctaccagctaagagacccagaggaaacagaacacttctatctcaatagttccaccaaagttccaggcccaaccatgagtcaattcctgagatgctgattggtcagacctgggacatgtgtccgttctcacatcaggaagtgatgtgatctccacttacactgcacaggctgagagtggggttggtctggatccccaaggaaaatagaaagtgctagaatcagaataaagggggaatagatgtggggtgggaaaaccaacagaggctcacttcagtgtgcatgggatacatttctgagtaatatgggagggtggtttttgtctagggatctacagaatgtgtgtttgtgtgtggggtggggatgaagggttgtctttaaggagcccagcagcattgaggattggtctgggatggaggcccagggtttggaggcctggatttggctgctattttacattttattttattttattttttgagatggagtttcactctttcacccaggctggagtgaagtggcataatcttggctcactgcaacctccgcctcctgggttcaagcagttctcctgcctcagcctcccgagtagctgggactacaggcacataccaccgtgcctggctaatttttgtatttttagtagagacagggtttcaccatgttggccaggctggtctcaaactccttaggtgatccacctgtcttggcctcccaaaatgctgggattacaggcgtgagccactgctcctggccttggctactattttagatagggcagttgggaagagcctcttttaggagatgacatttaacctgaactccgcagggtgaaaagagcttgtcttcatcttcatgagggtaagggggatgatttagaggtaggaattatcttgggatgatcaaagaacaaaatgatgactggcgagacgagaacatggtgcacagtggggagccgggaggcaggatcttgtgggcttagtcagttcctcattgaacactagtatggaaagccatgacaaagtgttaagcagaatcagtaaagcacagtgtcactcgacctttgaggattaccagaaggaggacaggccaatcgtaagcctgatcaagagaagggaaggaggaaggagaagggggaactttctctgtcaccttcccgccctgttgaggcagttttcatacgttggatgtttaacacaacccaaccaagactgggacccggtgcagtggctcacacctagaatctcagcactttgagaggccaaggtgaaaggcttgagcgcaggagttcaacactagcctgggcaatatagtgagaccctgtctttataaaaaaatagaaaaattagccaggcatagtggtgcatgcctatagtcccagcaactcaggaagctgaggtgggatgatggctcgagcccaggaggtcaaggctgcagtgagccatgatctcaccactgcaccccagcttggcgacagagcaagaccctgtttcacacacacaacacacacacaaagattggtatggtcactcttactttactgacaagaaacctgcgtacagaggagctaaaccaccatcccaaggccataaaactactgcgagtctaagccaggatatgtctgaatatgaagactcctctgaatgctgggtcccagaagcactaagcttggttatgaacctcatgggctctacatagcttctcaccaagttgggtcctgttgagcctattgtgcaaggaaggagaccaaacaccctggaggtttgctcacctggcctgagttacctggccgtggaaggcccctgggctcaagttccctgagaggcaggggttaaaccatgtgtcctagaacctcagcttgcatcccaccctggaattttcctctgagttgcaaaatcaggcaagctgccaagccatatatacattgccgggtagccaggcaacaccgtgctttttctgggaaggagcacaatgtggtcactgtgctgccgacgccaggttccagatggaagaaagactttaatccccagcttcacggctgtttggcacacttcgctcctgaaagcctgctcgggccagttttcactctgactctccagtgaggccattttgtctcattccgtttctgatgtttaaatgttaatcctttacaagttggttttagtggagtaggaaatggcggagaaggctggaggtggattcagatgcaacagggatggcacttacacctttcgatgaaaaagacgtgtgattccgcgattttgcagttgtgaattgtgctgctatacgcatgtgtgtgaaagtatctttttcacataatgacttcttttcctctgggtagacacccagtagtgggattgctgggtcaaatggtaattctacttttagttcgttaaggaatctccacactgttttccatggtggctgtactagtttacattcccaccagtagtgtcgaagtgttccctgatcacaacatccatgctaacatctactgttttttgattttttgattatggccattcttgaaggagtaagggggtattgcattgtggttttgatttgcatttccctgatcgttagtgatgttgagcattttttcatatgtttgttggccatttgtatatcttcttttgagaattgtctattcatgtccttagcccactttttgaagggatttttttttttttttttggttactgatttgtttgagtccattgtagattctggatattagtcctttgtcagatgtatagattgtgaagattttctcccactgtgtgggttgtctgtttactctgctgattgttccttttgccatgcaaaactcttcagtttaattaggtcccagctatttatctttgtttttattgcatttgcttttgggtttttggtcatgaaattcttgtctaagccagtgtctagaaaggtttttccaatgttattttcgagaatttttatagtttcaggtcttagatcaatcaatgagtgaataaacaaactgtggtatgtatatatatacgatggaatacttctcagccataaaaaggaatgaattaacagcatttgcagcaacctggatgagattggagactattattctaagtgaagcagctcaggaatggaaaaccaaacattgtatgttctcactgatatgtgggagctaagctatgacggcaaaggcataagaatgatacaatggactttggggacttgaggggaagagagggaggggggcgagggacaaaatacaacaaatatggtgcagtgtacactgctcgagtgatgggtgcaccaaaatatcacaaatcaccacaaagaacttactcatgtaacctaataccacctgtaccccaataacttatggaaaaataaaataaaataataataaaaaaagaaaaaatgtgtgagcaaaatgattaataggcaaatgatagaagaaaaagaaaaagcccatgaagttagaaagagaggcatcacttctcgagtgaacaggaaatggaaatcaggaccacataatgtcaagtttaactctcagagtgatgtaaaaatgaaaatcctagggctgggcatgggtggctcacacctgtaatcccagcactttgggaggctgaggcaagtggatcatgaggtcaggagtttgagaccagcctgaccaatatggtgaaaccctgtctctactaatgtgcaaaaattagccgggggtggtggcacacatttgtaatcacagctagttgggaggctgaggcaggagaatcacttgaacctgggaggcagaggttgcagtgagccgagatcgcaccactgcactccagcctgggtgacagagtgagactctgtctcaaaaaaaaaaaaaaaaaaaaaaaaatcctgataaaggccagtgttggtgagggtgggcagagtaagtgtctgctgtcatacgtggcaatgggagacatttagggtatgacctctctgaggtgattttatgggacttgccaacattttgactatgtatgacccccccaacacagcaaatgtgtttccactaattaatcttgcagaaatactcagagaagtgcacattttaaggcgagaattgcaaaatattggagattctctgtctatcaatatagaaatggtaaaataaatggtgttgcatccataccattgaatcttttgcagaaaaggttgatgcagagatgtgtgtttcagcataggaggttgccttgcctgggacatactgttgggtcaaatagggaaaaaaattaagttagtgaatgatatatagagtctgaattcaattctgttgaaagagtatatatgtatatatatgtttgtatttacttatatttttaaatacaccaagaacatttctggactttgtattttttttttttttttgagacagggtcttattctgtcacacaggctagagtacagtggcacaatcaccccctgtggtctcaatcaccgcctctggtctcctacctcagccccttcacctgtggagtagctgggactgcaggcgtgcaccaccacgcctgttttttttttttgttttttttttttgtaatgatggagtctcactgtgttgcccaggctggtgtcaaactcctggggccaagcgatcctcctgccttggcctctcagaatgctgggattataggtgtaagccaccatgctcatccagaaaaataaaatattaatactggccatcattttaggattaaaaagttgtcaaaaatgcactgttggttcaaaaaacaacaaagggcaagttgccatgctgtatgtagaatattattttatgtctataaaaaagacactgtgtgtgagcatgcatgtgtacacacaaacacagatactatatatacatcctttgtacaaaaatttagagaaggtaaaagcaagaaaaccttgctagtgattggccctgtgggattgggagaatatttttgcttttttgctttctatatttctatatagtttgaagtttctcaaaggttgcatttttttaatttaaaaaaattatttaaaatacctttaagaaactgccatagtcctactaccctaacaggagtaattttagcaattttctgtatgaatctctccctctctatatatatctttctttctctatacccccatctatatacacacatatacacctacccagtaagtgagttgttatcccttaaaccccctcccatgggagagtccccccttttctgagtcatcagtgtccattataccactctgtgtgcctttaggtacccatagcttaggtcccacttataagtgagaacatacagtatttggttttctgtctcagttacttcacttagaataatggcctccagctccatccaagttgctgcaaaaacattatttcattgtttttcatggcttagtagtatattccatagcatacaaatataccatattttctttatctacccattgactgatgggcagttaggttgattccatttcttcgcaattgcaaattgggctgcgataaacaaatgagtgcaggtgtgacttttatataatgacttttttttttttttttcagatggagtcttactccatcacccaggctggagtgcagtggcttgatctcggctcactgcaacccctgcatcccgggttcaagtgattctcctgcctcagccttccaagtagctgggactacaggctcccatcaccacgcctggctaatttttttttagtatttttagtagagacagggtttcactatgttggccaggctggtctcaaactcctgacctcatgatctgcccacctcagcctcttttcctttaggtagatacctaatagcgggattgctggagggaatggtagatctacttttagttttttgggaaatctccatactgttttctataatggttttactagtttactttcctaccaacagtatctcagcattccctttttaccacatcccctccaacatctattggtttttgactttttaaaaatggccattgtaattgaggtaaggggtatcccactgtggttttaatttgcatttccctgaacttctttttttttttttttactttaagttctggcatacatgtgcagaatatgcaagtttgttacacaggtatacatgtgccgtggtggtttgctgcactatcaacctgtcatctaggttttcagccctgcatgcattaggtatttgtcctaatgctctccttcctcttgctccccagcccctgacaggccctggtgtgtaacgttccactccctgtgtccatgtgttctcattaaaacttcttctttttaaaaacagttttgctgaggtaaaatgtcatcaaatagactctgcataaagtgtacaatttggtaagttttgacatctgtctgtacccgtgaaatcttcaccacaaccaaggtagtgaacgtatccatcaccctcaaaaatttccttttggccaggcgccgtggctcatgcctgtaatcccagcactttgggaagccgaggcaggtgcatcgcctgaggtcaggagtttgagaccagcctggccaacatgatgaaattccgtctctactaaaaaatacaaaaattagccaggcgtgatggtgggtgcctgtaatcccagctacttgggaggctgaagcaggagaatcgcttgaacccggaaggcagagcttgcagtgactagagatcccgccactgcactccagcctcggtgacagagcgaaactccatctcaaagtcagcagcaagaggtcaggagtttttactccctcttcaatgttttattcccaatatttagatcagtgcctggcatatagtagatagtcaaattgtaatttgaataaatcctagcttccttttgctacaccaaggcccacagctcctgctggtagctttacactaagaacgactgcggtctgccaagatcatgtgtgcacgtgcctccgggcagctgcatccaaggacgtgattaactgctaagcccccctggatctatgcattccttggtcagcacattttcttcccagtaaagaggctacagacccagcaatgttatgtaatccccaccacaccccatgtgagacaaatcctctaatcatttcagatgaaagatttgaagcacagagccattaaggatggatcaaggttggacatgaaattggcgtggttttatgcagtggatggtaaccaggacccaaaataggattcaagagaagtctatttgggggtggagcagtggaggcaggaacccaaatataagaatgtcatgctgtgggccatcagtcaatggcatttggggtctaggggtgagagaaggatctgggctacagctggcgtaccctgatggcggctgggcctgtggctgtggctgaattatctcagaagaaatgaattacctcagaaatgataaaggaggattaggaccatccacacccttggtggaatgcctgagctctggtggaagcaatatctgttcagacggatctcagctcagtacgcaagaaaaacccaccacaatggcttcaatgagtaagggatttatttttcttctgtaactgggggtggactgtcatagctcactgacttcatcagggattcaggctccttttttcttactctctccgcctttcatagcacacggactttcataacacacagacatcttcctcatggctgcaaaacggctgtggcgcttccaggcatcacatccgtgttccaggcagaaagaaaggggaaagaccaaaacccttctccttacaaagctttgctttttatttgagaatggatggcaaaaggattttcacccacgtcccactggccagaactgtctcacttgccccatttatacagctgcaagggtttctgggagaaaatatttttgactgagcacattgctgctgtggacagaatcagaggttgttaacattaaacaagagagagagtggaatgcagagcaggaaggcaagcagaatgtctggcacagtcagtagcaaagtgaggagagagcttcgagaagaggggtctaagcaggatcctggaagtgaggtgggtctccagagggagtgctgaaggtattttcatttcaggaggcaagatctggaggagcgttgggaagggaatcgaaatagctctcaaatgccctcactgccacccactaatggagacatgatcgttccccttctgcagatggcagaatgaagtcttacagacgctaacaggcccttgtcactgtggtaacttcctgaagcatttatatacttgaataagtagtcaatacacgtgatacaaaccttttatttaaagcacaaaagaatacgtattagtgaattttccttcccatcgctgtgtcccagctctcttccctggaggcaacgacggctaacagttacagttgatcttcattatttgcagattctgtgtttgcaaatgtacctactcactaaaatgcatttgtagcccctgaatccatatgcacaatgttttcatagtcatttgtggatgtgcgtagagccgtgaaacattcgagaccctcactgtacaggttcccagagaaggtggaccgaggtctccgccttcttgtctcagttctcatattgtaaacaactgtccttttggccgtctatttagtgccacattttttgcactttggttggtgatttggctgttaaaaatggctcctaagcatcgtgctgatgtgccgtctggtgtccgtaagcgcagaagctatgatgcgtcttatggaaaaaatctgtgttagatgagctttcttcaggcacgagctatagtgctattggccatgagttcaatgctaatgaatcagcaatatatattaaataaggtgtctgtaaccaaaaactcacataaagcaaggttttgtgtgaatcggttgatgaaaatgcaggaacctgagtgtgttaaccttttttttttttttcattttctgtatttgtgatgctttgacatttgagaatgtgctgatcccagagagcctgcctcttccagggccagccagttcctagagattgaaacagtaacctaggagtgcacctctctcatgcaaaccggtcagtctggaaaccttccttcaaaccacatccttcaactaccacctttgtggggctcccacaagtgacccacatcccccatgccctagtattgcctcaagtccaggtaccagacaactagtggcagctacaccctggagcctgctgaaattattccaatttgccaatctgaaggctgcctacccccaactggttccttcccaaggagaccataataaagtcctgtgccttcctttctcctcactcctctgtctcccggccaaccctggtgcttccccatgttcccccatgtggcatgctgtgcctctgggttccagggatctgtgtctatgaatctgttccttcacaacaatcatttctgtgcctgcctttttttttttttttttttgagacaagagtctcactctgtcacgcaggctggagtgcagtggctcaattttggctcactgcaacctccgcctactgggctcaattgattctcctgccttagcctcctgagtagctgggattacaggtgcccgccaccatgcccagctaatatttgtatttttagtagagacagggtttcaccatgttgaccaggatgatctcgatctcttgaccttgtgatctgcctgccttggcctcccaaagtgctgggattacaggcgtgacaatttttgtatttttagtagagacagggtttcaccatgttggtcaggatggtctcgatctcctgacctcaagtgacccacccacctcggcctcctaaagtgctggaattacaggtgtgagccaccgcgcccagcctatgcctgtcttaccatgcctgattataccaaatcccaggaacatttcaacactgaccctgtatattccctagaagcaatggttccatattgctaattcagtgtccacagtgacgttatagaacacatagctaccctgaataatcagaatcgactgtttgtatttatccttccagagatgttctggacctgtgccaggtaatagatttctttctatttctttttttttcaccacataaatgtatgcacattatagatgctattttgcatgttgatttttttaaaaaattgacaaataacaattgtatatttccatgggctatagtgatgttttgatacatataatgtatgatgatcagatcagggtacttggcatatccatcacataaaacattgatcatttctttttttatttttatttttattttttgagacagggtctcactccgttgaccatgctggagtgcagtggtgcaatctcggctcactgcaacctccgtctcctgggttcaagcgattttcctgcctcagcctcctgagaaattgggactacaggacaggggcccaccaccatgcctggctaatttttgtatttttttagtagagacagggtttcaccatgttagccaggatggtcttaatctcctgacctcatgatccgcccgcctcagtctcccaaagtgctgggattacaggcatgagccaccgcacctggcctatttttattttttgagacagggtctcactctgctgcccatgctggagtgcagtggcacagcgatcacagctccctgcagcctcgaccttccaggtgcaggagatcctcccactgcagcctcacaaatagctaggactacaggcacatgtcaccatgcctggggattttgccatgttgcccaggctggtcttgaactcctgggttcaagcaatctgcctgccttggcctctcaaagtgctgggatcacaggcttgagccaccacacccagctgccacaatgatcatttcttactgttgggaaacttcaatatcctcttgctagcatttggaaatgttatgttattgttcactgtagtcatccgcagtggtatagaacactagaactcatccatcttgtctgcatcctagtttttaaacctaaccatgtgtcttggtgattgcccactgtgttagcttgggtcttccgagaagtaggcgccaaaacaatattagatgtgtaggggatttattagggaaaagatctgtaagggaaaatgaggaatgagctggaggagtctggaaaagttattgaatttggatgccaccacacccgaccctgttatcactattttaaccctaacttgtacaccaccaggagttccagtggcagtttgctttgtgaccagtttctctctttcacaatcaccacaggctatggatccctggacatctttctagtccttggcaatctctctcttccagtaccaatccacaggcattccatctttcccagggtgaacagggctatccaattaattccccttcttgcaggacttggcattatagcccataggggaactggaattgcctccttaacctatagccagctctcgaaggaaatagccaacaacattgatgccatggcttgaaccttcgcaactgtgcgagaacaaatagactctagcagctgtagtcctcagaaatcattgaggactagatatgttaacagcagcacagggaggaatttgtttagccttagatgaaaaatgttgcttttgggtaagtcaatcgggaaaagtacaagacaacatcagacctggacggattcgctgctggtaacatacttggcccatattttgcccataacagcctggcccagggctgggtggtcgagtagacaggcctcgggtggcaaactgcagtgctgggaatcggaccagttcacctgattcccggggggctgcctttggtattctgaacacgccgccaggcacaaagcgctggatgttgggtgtctcgttcacctctcactgccttctacggatttcaacacatagcatcatgatgggaccacagctctgagaatgacagaagcaccgatctccatatcacatgactcctgagtagaggaaaatggatttgagctaagggcaggtgaattaaaaagttggtgcaaatcaagacaaagcagtttgattgttaacacatggcccagtttccgaaggcaaactcagctcatcagcctactgtgggattttcccctaggctgaaaagccaggtttgattccaataaacgtatacattgcagtgtaattaggcaagggaacagggttcttggagccacaaagccccatggtcagtatttgggtgacatctacttcctgactgtaaacagatttaaatataccatctgttttgcagatatttctcagaacctgtttttaatcagtttttctctctaattttcggatactgacaatcttgttttctttttctttatgtgttttaaaaaatgacataaaccagtattgcttttatttttttcatgtgcttggcttgattattttaagctaatttatataccttcattcgttccgtaacagccaaaagtgaaacttttttttcctgtttcttttgtcatcaaggcacaaagaataacagctttcaaaatagtctttggttttgtcctttaaatggtagaaggtcatcattttgttttcgcttttgtatttctatttctgatagataaatagacatagaaaaaatgatgtacagaagttggctaaattgtgataatatactctttaatttctgttaactttggataattctaataatgtttcttcttgttttgagtttttttgtttgtttgtttttgagacaaggtctccatagagtgaagatttactctgtcactccctggagtgtggtggtgcaaccacggctcactgcagcctcaacttcctgggctccagtgattctcccacgtcagcctcccaagtagctgggactataagcatgcaccaccgtgcccagctaattttttgcatgtctttatagagacggggttttgccatgttgcctcagctagtcttgaactcctgggatcaagtgatccaccgccggcctcgacctccgaaagtgctgggatttcaggcgtgcaccactgagcccagcctgggcaaattcttatgtgggggtcatttattaccatgtctgttattggatcactgctatttgacaatttagggcagaaatatcagaaaatagggaggccttggaggcttcctcttgttcgtgctgtgaactgttgggtgtgtgctcacaaattccaaatgaggacggaataaattagctcggttttgggatgccattcgaagctcctttataaaacttggaaagttgatttaagagatatttctctttcattgttttatttttaattacaaaagcagtagattttttttggataaagaaattagtttccctttcacattccaaaccaatgttcaaagatttgctggtttctgcctccttctttctgcttctagagctgcctcatgatccaatgtggttcttctaattatttgcttaaaaatgctcttaatgttttttgcctaaccaacttatttttaattttgcccaccctttgccattccctacccccaggcccgtacgtctttgcccgattgctattgaggtgcacatactttcagcagcctgtgccatttcacagggcaccacgagcaggctggcgtcggcctccttcattgatgccaccagtcactttttattacctgcctacgttccagaccaggttccctctatttcctgaagattaagaccctctgagtgtcactctgccctgctaaatcagttccgctcataatcctctgcttagaaatatctacagggtggactgggtcacgaccgacatcaccatctgacagctgttacaactccgtgcccaaactaaacttttcactaaacacttctttaggggacaccaaggacctcctcccagccctgccaaattaactcactgaatacccatttgccaaaagctggttctccaaatgatcacatttttaaaacttcccaatttgctggtttatcccaagttgtttttctcaaaacaacaacaacaacaacaacaaccccgcccacacacacacacattagaaacatttcatttcacttctttaacaaatgtttgtggggtttttactacacacaaggtgccaaagtgttggggttaaagtagtgagtaagagagcaaatgttctcatcctcatggaactcccaggccggtggaggaaacaggcaagaaggacataaataaatatgtaacacaggtggtcatggaaacatgtagagcaccctgaggcagcaagaagagtgggcatcaaataatataataacatatatgatgtagtatttatatagtataatactatgtgatgcaatacaatgtataatgtacacagtataaaaaataccatttgcagccgtaaaaaagaatgagttcatgtcctttgcagggacatggatgaagctggaagccatcattcccaggaaactaacacaggaagagaaaaccaaacaccgcgtgttctcactcaagtgggagttgaacaatgagaacacatggacacagggaggggaacatcacacaccagggcctgtcggggtgtgggggaaggggagggagagcattaggacaaatacctaatgcatgtggggcttaaaacctagaagacaggttgatagtgcagcaaaccaccatggcacaggtatacctatgtaacaaacctgcacgttccgcacatgtatcccagaacttaaagtaaaattaaaaaaaaaaaaagacagttgactcttgaacaatgtggggagttaggagtgctgagtcctgtacagttaaaaatctacagataggctgggctgcagtggctcatacctgtcactccagcactttgggaggccaaagtaggtggatcactggagcccaggagcttgagaccaacctgaacatagagagacactgtctctacaaaaaatacaaaaaaattagccaggcatggtagtgggtgcccgtagtcccagctattcaggaggctgaggtgggacaatcgcctgagcctgagaagtcgaggctgcagtgagctgagatccttgcaccactacactccagcctgggtgacaggcagagtgagacctgtatcaaaaaaaaataaaaataaaaaaaaaggaaattcatggagaactttggactctccccagacttagctactaatagcctaccaaagaccagcagccttaccaataacacagtcaattaacacatattttgtatgttaaatgtattatatactatactcctgaagtaaagtaagctagagaaaagaaaacgttattaagataatcataatgaagaaaaaatatgttcactcttcactaagtggaagcagatcatcttaaaagtcttcatcctcgttatcttccattaagtaggcagcggagaaggaggaagaggaggggttggtcttgctatggcaggggtgtcagaggcaaagaaaacctgtatataagcggactcgcacatttcaaacctgtgttgtttgagggtcaactgtatagtatataatgcaatataatatgtaatataggccaggtgtggtggctcacgcctgtaatcccattacattgggaggccgatgtcgggcagattacctgaggtcaggagttcgagaccagcctgaccaacatggagaaaaaccgtctctactaaaaatgcaaaaaattagccgggcatggtggtgcatgcctgtaatcccagctactcgagaggctgaggcaggagaatcgcttgaactcgggaggtggaggttgcagtgagctgagatcacaccattgcactccagcctgggcaacaagggcgaatctctccgtctcaaaaaaaaaaaaaaatatatatatatatatataaaatataatatataatagatatgatataatgtaatatgtaatgtagtactacataatactataatatgtaataatatagcatataataatattgcttagggagtagacttttagtgttcttatcgcaaaaacaaaagtatgtgagataatgcatatgttaactagctcaatttagccacttcacaatgtacagattttacaaaacacatacacaataagtacatctaatttttgtttgtcaatttaaaaataaaatgttaaagaaaaatatgccataaaacagaacagaatgtaatatcatctaatatgtgacatgatgatatgatacggtcatgtgttatgcaatgcagtaatgtgtaatatggtttagaataatacagtgacctggccaggcatggtggctcacgcctgtaatcccagcactttgggaggccgaggcaggcagatcatgaggtcaagagatcgagaccatcctggccaacatggtgaaaccctgtctctactaaaaacacaaaaattagccaggcatggtggcgtgcacctgtagtgccagctacgcagtaggctgaggcagaagaattgattgaacctgggaggcggaggttgcagtgagccaagatcaggccactgcactccagcctgggagacagagtgagacaccatctcaaaaataaataaataaatacaatagagtgacctaatgtaatttgttgggtggtggaaagagtagagcaggtggagggagtggggagtagtgcagaggcggctgatgtggtcagctgatgtagtcaggaaggctcctccaagcaggggacaactgccccaagacccgaaggatgtactcattctaccacagcaagattctgggggaactgcagagggaaccggaagggcacagtctccctgcagaggcacagaacatgctcagggaatggagggaagcttggtgtggtgggaatggagtgaacaaaggggagatgggagaaggtaagagtaggctgaagaagagcaatggatctcatgggacctcatgggacctcgcaggcacaagggagccgtctggatcttgttcccagcacgatgagacccttggatcttcttcaatgttgtgacgtctggtttctggatctggttgcccctgatcctcagtgtcccttggtttgcagccacagggctccaagctctgcctctaacatcacaaggcatgctcctccctgcatctctgcgtgtcctcttctcttcttattgggacacgagttattggatgtgggaccttccctcatctgctgtgacctcatctaaaataatgatatctgcaaaaattcgatttccaaatgaggccacattctgttctgagtggacatgaatttcgggggaccccgttccacctagtacagctaggaattggcatgggctggacggagtgagtgtgggtagaagtgagaaaatgctcactgacatggaaggaaaacccagagagtttgggatgtgcaaaccaaacgaggaaagattttagcagagaggacgaggtctaagttgtcatgtgtggtcaacaattggatctgatgaagactaaggactggattgtttctggcaaagtggagaatcctggggaacttgacaagagtaggtcagtgtgggttgggaatggaagccagatacccatgggctcgggagagagggaggggagagagttgaggggaaggagcagagagatgccttggatgtgttttgcctatgaaggggcagtggctagggaggaacttaagatctaaaaagcatttgtttttttaagatggaagacaacacagtatgtgggaatgttgatgggaagatctcatgcagagaaggaaatagatcggttgatgccagcaagagaagatgacaaactgactttccgatgagccacaagtgatgggatgcgctgttcagggggaggagttggaaagaggatttgccaaatggacaatttgccaaattatggatccactgtaaatgaatttctactaaatatttgtaaacattacacaaaatcatgccaccatgggatggtgttaatggacttcaagggtaactcttctctttcttttcttttcctttcctttcttcctccctctctccctcccttccttccttcctttcccttccttccttcctttctttcccttccttccttcctttcccttccttccttccttccttccttcctttcctttcccttccttccttccttttcctccattccttccttcctttccctcccttcccctctttctgtctttctctctttcttttttccaagacagagtcttgctctgttcctcaggctggagtgcagtggtacgatcatggctcctgcagcctccacctcctgggctcaagcaatccttccacctcagcctccccagtagctgggatcacagttgcacaccaccacgcccagcaattttttgtagagatggggtttctccatgttgcccagactgatcttgaactcctgggctcaagcaatcctcctgcctcagcttcccaaagtgctgggattacaggtgtgagtcactgcacccagccagctttgatgttttagtttcatttcagctgaaattaaatttggtttcactgtagattttgtttcactttggcagatttatctcagctctgtagctgatttgcaaatcaggctcaaagacgcatcagatttaggtgtaattctcattataggcactgagcatttctcagatgtcttacccatgttgaaaacatttgtgtgatcacactgggtaacatatctgttaagagaatttcaaaagacaggagtgaaaatgagttggataatagaaacctgttctaccttttgtattacgcttggtggaagcatcccgaaattctcattttaaatataaaaatcctcagaacacactgaacttcagtttggctacaatgaagcagctacagccaatgtaaagctaaactaaaatctgccaaaaaaatgaaacgaaaacttcaagtcagatcatttaaacagcacagaagtttccaggaactcccttacaattgggatcgctgtagctgtcacaaggagttaaaggaaacatgcttctgtcgctgttaactagctgcatccggtgaattgggcaaatttggccattcagggaattaaccatccacaaaagtaaataaataaataaataaaataagccagtcatttgaagaactgattttcagggaatttatttagcgttggtaatgtctaaaagttacatgtgtggttgttggttttatgattatctttaatgcattccgatgtatatttatatatacgatcttctccatgcctgacatatttcacggtaagataaagaaattcccgtggcttataaggaatggagactgaatttgaattcaagttgtttagaaagaaatggatgagcactgaacccacatatttgaattttttaaaagtccagctgacagatgttgaatcagcttatccccctgctggagaattttgccccaaggtaaaagcaagctttgatttcagcaccgtatgcatcgcagtgaagttgggcaaatgaatggtgtcttccatacacagcactacgtgtttggcatacggaatccctcccttgcccagcagtaaacagacttgaatacaccatctgtttgcacaccaactgtttgcaaggaaattttttttccttttctttttttctctgtgaagttaatgttgtgacaactttatattttctttttttaaaaaaacagaaatctgtgtttgtgtttacttagacctgggctaccttagatggttctcaggctcacttatacactttcatgtgttccattaaaaaatgtgatcgctttctttttcttctgattttggttgcaaaggctaagaactttcagaacagaattttgtttttgtctttaatacggagacgtttcgtgttgttctctggtttttcagatgggtggacacagaaaagacaactaataccctgaaattggttgaaacttgattattcattcttaaagtctgataattataactgtccagtaacttgataattccagttctgttttcctgtttagaacctctactttcttatttgagaaaaaatgtttgaggatgttatctcagtatgtgtttacttatcttagtacacattcccttgaacttttcgcttatcatgaccattgaaatatcttggaacatcagtgttagaaaagcaggaagaacgtgggaaactccccctgtgtgcacggtgggcccctctatgaattgcaccagacaaattccaaacaaagtgatggagaaaatcccccaagaaaattagcagtcttttttattcaaacttttttattcaaactttttgttgtactgtgtcaacagctctctggagaccaccgtgtgcccctcctgttccacagccaccccaaagcaactgttaaagatgttttgtgggctgggcacagtggctcacacctgtaatctcaacactttgggaggcggaggcgagcagatcacctgaggtcaggagattgagactagcctggccgacatggtgaaaccctgtctctattaaaaatacaataattagctggttgtggtggcaggcacctgtaatcccagctactcaggaggctgagacaggagaatcgcttgaatccaggatgcggaggttgcaatgagctgagattgcactccagcctaggcaacaagagtgaaactctgtctcaaaaaaagaagaagaagaaaaggaggaggaggaggaggagaaagaagaagaagaggaagagggagagggagagggagaaggagatggagaaggagaagaagaagaaggaagacgaagaagaagaaggagaagaagagcagctaccttgacagggacgtccaccttggaaggtgacatgctctgggtgaaaaggaaagttggttttattccagaagtggcacccctggggaggcggtgaacagtggaggcgtgttccaagaccacctctccacgtgtgcctccggatcagggaaattaggggagcttaaatgatggtcaaagtgcttttgggaaacgtgcacgggctcaggcggacagttaatcgcggcttccttggtcaatgtccctggccttctgcaggaatgctcaagctgttcttatcagggcggtcagcacattcccagggtggctggtcagctgctctctcttttatctctgttgaaggccttgttctccggaggctgtttttaataaagaagctacaaactcgagcaaagcaaggattctatgcaagcaagcaagcaagcttttctctaacacggagtcagtactgtgacacaacttcactgtcttcatcctgtccaactcctcaccttggaaagcctcccctgcacccccattgtttaaaacaaccacaaaaccctctgcacagctttcttccccgagtcctcctggtgattctgcacctcctgggtcttctcattcactgaactgagtgggttccttctcaaaacctgacctttaaatacagacgtttctgaaggactctgtccggggctccttcccttccctctccacatcctctccttggtggatttcatgggccgcttggctttatatgccgtccatatgccccagactccctgctgtagactgactgtgtgcacccattccccattcttatgttgaactcttaccttcactgttttccacaatggctgaactaatctacactcccaccaacagtctgtaagcatgcccttttctctgccaccttgccagcatctattatttttttactttttagcagtagctattctgactggtgtgagacagtatctcattgtggttttgatttgcatttttcttaatgatcactgatactgagcttttatatatatatatacttcttgacccatcaatcccattactgggtgtacacccagaggaatataaatcattctatcgtaaagacacatgcacatgtatgttcattgcagcactattcatggtggcaaagacatggaatcaacctaaatgcccatcaacagtagacaggataaagaaaacgtggtacatatatgccatggaatactatgcagtcataaaaagagacaaaatcatgtcctttgcaggaatatggatggagctggaggccattaaccttagcaaagtaacacaggaacagaaaccaaataccacatgttctcaattataagtgggagctaagtgatgagaacacatggacacatagagggggaacaacacacactggggcctatggtggaggatgggaggagaaagaagatcaggaaaaaatagataatgggtactaggcttaatacttgggtgatgaaataatctgcacaacaaactcctgggacatgcatttacctatatcacaaactgtacatgtaccccaaacttaaaagttaatgaaaaagagaaagaaatgttgccctctaaggtgatggtgttaggaggcgccttccaggaccgtctactctaagaggatctcctgggttatttgctgtgtctgcttctgtggtctggccttcacaacacttagtacagttcctacttattttatttactggcctatttcctgttttttgtttctctctatgacataatatgaaatggccgggcccagtggctcacgcctgtaatcccagcactttgggaggccgagatgcgcagattgcctgaggtcaggagttcaagaccagcctaggcaacatggtgaaaccccgtctctactaaaatacaaaaagaaaatcagccaggcgtggtggcaggcgcctgtaatcccagctatacaggaggctgaggcatgagaattgcttgaaccctggaggcggaggttgcagtgagccaagactatgccactgcactccagcctgggcaacaaagtgaaactctgtctcaaaaaaacaaaaaaaaaaagaaagaaatacatatttggtttctgctcatgttctgggcacacaggttcgaattgaaaagtgtatttgtttgctagtggtgactgctactaggggctcccggacagcctcaggttgggggtggttgccggggaaatcaaccatgtgattagagggttggagctttcaggtccctcctcgccacgttgaggagaaaaggagaggggctgaaggttgttgatcaccaatggccagggatgtaatcaatcatgcctacataatgaagcctccataaaaccccaaaaaggacagggtttggagagcttccaggctgctgaacacgcagaagcgctggtggggtggttcgcccagagaggacatggaaacgtctcaccccgtaccttcgtaactacagcctcatcctcctgatgcgatttcactgttatgcttataggacttaacacgttaatcacagccctttactctctgtacacactaatcaccacacagcaaggaatatttacataccacatcaacaatattaaatcctcattcatgcaagaaaataccccaataccgatacacctaacaccccttctcctattatccttaaaccccaaaatgattttgagttttacatgctgttgttatagtttaaccaaaacattagatcgtggatctaataacagaagtctacaatttcttatctaccgagaaagtatgcaagaactggtaactcatgccccaatatataacaatatggcattctcaacttttaaaggattagagttaaccattggtctaaggaaccaaaaacactggtgcaactccaaataaaagtaacaagtacattttcctcccatactgtaacacccctaatatcactaattttaccaactgctgctaccttaactgacatctactgtagtgatttgtaccccaattacgtaaaatcatccattgcatgcacctttgccattagcctcatcccaacaacaatattcatatacacgagccaggaatctgtcatctctttataataaatggatcatctaagtaacgtggtttcctgagttctgtgagccgctgtagcaaatgatcacacccaagcagggcatcgtgggaaccctgacttataggccataggtcaaaagtacaggtcccaactggggacttgcaattggcatctgaaatgagggcagacttgggctgagctctggcctgggcctgtgggatctgactctaactccaggtagtgtcagaactgaatttaggccaggcgtggtagctcatgcttgtaattctggcattttgggaggctaccttaggcaggaggattgcttgagctcaggaatttgaaaccagcctgggcaagaaggtaagaccccatctctataaacaaaactaaaaaaattagccgagtgtggtagcacatgcctatagttccatctacttgggaggctgaggcaggaggatcccttgagcccaggagtttgaggctgcagtgagctgtgatcctgccactgcactccagcctgggggacagaatgagactctgtctcaaaaaaataaaaaaataagaactgaatttagttacgggacacccagttgatgtctgctggaaaatatagagtagaaaaaaaaaaccccacacatttggcgtcagaagtggtctgtggtgagagtacagtaggagaataaacagttgtacatgttcccttcctggaaaagttatttccctgcactgagggcctgcattaattaggataggctgatagcactgcggtacaaacaatacccaaacttcattgatttcttattcactctatgttcattttgagtcaacagagagctctcatcattacagtcactcagggtcccaggttgttggcacatctaccatctcagtgtctactttatggaaaatccagcctgccacactagacttgccaaccagagcttctaccatggtgtttccatgtggcttgggcttcctcacagcatggcagcctcaaggttgtcaaacttgttacatagtggctccagattccaagtatgagcgtcctagtaaataagacggggatgcatggacatttatgaagcaactcagaagtcacatagcattacttcctaccctgtgggtgaaggtagtcatgagcccacccagagcgggtacatagaccccacttctcaatgggaggaacgtcaaagtcacattgtagcagagaatatggaaagaaagatattgtcatggtcgtttttgtaaaaccgtctgccatgacccctgtctctcctggctctctccctcagcttcgctggccttttttttttcttcacttccttaaatgccctaagtgctttcttacttccaggactttgctcctgctgttcgttttgtgttgtggtgctttttttccaggagcacttcttcccaacacctaaagcactcagcttcctcatcctccttcagtccttacaccatcagagaagacttccctgaccgccatagttgggcctgtgtcccctgatactatctttctcagatactgatttgtttccattgtaacacttagtgtaatttgtaactttttttaattgattatttgcttttctgtattatttccaacacgcagaaaaaaatatatagggaataatatagtaaacacgacacccagatttatcaaatctttacattttgccatatttatttcagagcattttttttaaattaggcacaaatgtaggtgaaggtccttgtgctctctttgaaataccacccacgttcctccaacaccgacatttggaattgatcattctcatgtctgttcttcctacattgctgctgaaagtaagaaagggtgttgtaacatgttccaaacctgtgtgagtggcattgttctgcaaggaggttgtaatgttctacccttttatttttagcattttgttaagttgtgtggctccgttcacagcaggtgcaccaccatattccaatttaggaattcaccctgttttacacatccatctcctcctaagcacatttaggttggttcttggttttactactgcaaatgaagccacacacccccacagccttgcacagtccctggcatgcagtcagcactcaaataagatttgtcacatacatgaatatcgtgatgaacattctactctgtatctctttgcccagatgtggggaatttctctagaaaacatttctcagcacagaactgctgaggggttgaggatgtgcttctccacctgcctagatattgtcaaattacattctcaagtggaagtttctttatgtctttctcccatcaaaatgaaatttccagaattcagaaaactcgtctttctccccgccccccgccatatttctgggtctcacagtgttcttgatgtgtagagttgctcaataagatttctagtcctgtgttgtccaatacggtgtccaccagccatatggagctactaaacccttgaaatggggccagtgccatatgttgaaataatattttgcatatattgggttaaacaaaatatatcattaaaattattttcccccttttttacatttttaaatatgactactagaaaatttaacatacgtagcttgcattacatttctcttggacatctctagagtatgtataaatgaatggatgagtgtattattttgactcaactttgggattagaatatgtttttgaggtctttaaccatggaaaattttgtctcccccggggacattgggccatgtctggagaaatttgtgattgtcacagctgggaagaggagggctgtcagcatctagggagtagagaccagagatgctgcagaacattctacaatgcacagagtggccccccccagcaaagcgtgatcagaccctccgtgtccacagtgcgcaggctgaggcactctggtctatatcaaggcttatattcttattcttatcccattaaatatatcatgattttaaatgttcttcgaaaaccaaatttgtttgtaaaggaagacacttacttttgtttgacagtaaaatgctatcccatctttgccattaatgttcttgtgtaggcattgtatataatttttttcacattttcttaattcacatcgcaatggtactctacagacacgtgtgattttttatgtatttatgtagaccagaagtgggcttgtatgtgtttaattctgctgtgtatttagctctgaagccttcctagttctctagaaaagctgcgtcaacacatacctgctgttaactcagggaagtgtctgtatcttcaccctttcaaccaccctagatatttcatcaccagatttttcatctttctgagtcttgtggaaatagatttcatcacattttggttgttatatccaacttttgtttctgttgttgttattttgttgtttggttggttggttttttttttgggttttttttttgagatggagtctcactctgtcacccaggctggaatgcagtggcacaatctcggctcactgcaacctctgtctcctgggtttgagcgattctcctgcctcagtctcccgagtagctagaattacaggtgcgcaccaccactcccagctaatttttgtatttttagtagaggtggggtttcaccatgttggccaggctggtctcaaactcctgacctcagatgattcacctaccttggcctcccaaagtgctgggattacaggcatgagtcacagcatctggcctatatctagcttttggagctcaaacattatgatgcatttttttcaacatttctattttcttttcttttagtttcttttattttcgtgtgtgtgggcgggggggggggctgtgtatatacacactctttgtctgcatttctattctgaagttctttttattttcctttatgacctactgacactctgtgtagtgcctgactttctttgagtatatattttgtatttttactcggctgtccatcaagtcttattcatgatggggtttccctgtaacctaactttttagtatttatggagatggatttatcagtattttcttttatatccactggcttgtttgttcattttaatggaaagtttcccaccgtatgattatagaaatatccacctatattgtcttatggtgaggtgagcaaagaagttctctacatgctctgaatattccttctgtcctcaactcaaatgcatcctcagagtccttcagcaaccaatttcagctgctaaaagcaagatatggaccaaaaccgaacatgatagagggttctactggagctgattatttctgagaaagagcaaatgatctctgaaaactagctgttaggatgttcagcttggtccagttgccaaacaaaaccccagggcaactactcaccacggaattttcccccaattaataacctacgaatgcccggcttgagtccaagctccatatgcactgacacccaactcaggaaggcaacggttttcccagaaacagcacaacatagccagtagttgggagacaaccatttctaaaccatagaaaagacttcatactagctatctgtttatagattgtgttcctgggtcatgtccataactggattttctctggtgttctgggagcaaaaatcttctgtcttctttttgaggtgagtagagtcttccaaatgtccttcatggccccagcccaccgttttctttatgtaggaaggttttagatgttggcacatattgacacctacttgcagacaggtttgttgaattacattatataaacgttgaaataataactcaagcagtgagtacattttcactcttactcccctgcacctagctttataaatcgctaaatacatgcattcagagaatctgtgtgcttttctcaacagctatgttgtgtaatggtgaacatcattatgcaaacacagctgcaaggcaagttccctagctcccagcctcagatcagaccttcattcccaggtcccttctacgtggaagttctggagtccacctgctcacagatgctcacaaagcactggcgggacatctaaagagtaataggaacccacaccgatgttctaagcaaggatgggacgtggccagattttcctttgataaatctactcagactcacacgagaaaaattaactgaagaccaggaatgatgaaggaggagcccagtgtagaaatagatggtcgcaggacacaggagagagacgatggagacagggatgaggtgggacagtcagggagagggagagatgcatccacgaataaagttttattggaatacagccccattcactcattctatattgtatatggctgccttcacactacaagggcggcaatgagtagctgagtcaggtgccgtatggcccacaaagactaagacatttactacgtgcctctttacaggaaactttgtttacacccagcaaaattgttccacataatgattcagaaaagcctaatgattcagaaacttttgttgacccagcttcgaggaaaattccacagagctcacttcctgcatagctggcactctcttgggtcatcatcactggtaggcttctgtgagaacagcggaatttatcctaagggcaataggaatggctgaaagagtcagcaggggatggcttgactccttgacctgtatgttccttcaaggagaaagagtagttagagttgtttttgcagtaacttgaacaagagatcagaagggcaggctgatgaaaaaccgatttctaaggcagaatggacaagtcttcgaaaattgattggctacagggctgcggagggagaatctagcacgggtttcatggttttgtttttgtttttttacaagacagagtctacgctctgtcatccaggctggagtgcagtggcacaatcttggcccactgcaacctctgcctcctgggtccaagtgattctcctgtctcagccgcctgagtagctgggattacaggcgcacgccaccacatctggctaatttttgtatttttagtagagggggtttcaccatgttggccaggctggtctcgaactcctgacctcaggcgatcaacctgcctcaggcctcccaacgtgctgggattacaggtgtgagtcactgcacccggccaggtttcatgtttttgcaaaagcagatgagaaacagctctcaggcatggatagtactcctatctctgggaaaagagaccctgtggatgtggatggacaaagattttctagaaagaggatgagtgaagggtgctgacctccaatggaggaaaaacacaattccaaaaggaaagaaaggctgaccaggcctaagcagggcgtctctcctttcctttcccccaggattcctttaatgggaagggcagagtccccaggaagcaactcttggggaggaagaagaacgaagctcccaggcagctttctaaccactcacctgactccacctatccctgggaggagtccctgtctccatcccctaaatggagagcagaaaaacctacggctaggctgggcgcagtggctcacacccgtaatcccagcactttgggaggctgaggtgggtggatcacttgaggtcaggagttcaaaaccaccctggtcaacatggtgatgccccgcctctactaaaaatacacaaaaataaatggggcatggtgttgggtgcctgtagtcccaagggaggctgaggcgggagaattgcttgaacctgggagacggaggttgcagtgagccgagatcgcaccactgcactccaggctgggtgacagagcaagacttcattaaaaaaaaaaaaaaaaaaaaaggaagaaagaaaaaaaagaaaagaaataacaagtattggcaaggccatggagaaattggaacacttgtgcactgttggtaagaatgtgaaatggtacagctgtttcagaaaacagtatggcagttacacaaaacaattaaaaataaaatgaccatataatccaacaatgccattgctgggtatacacccaaaagaattataagccgagttttgaagagatatttgcacacctgcattcatgacagcaatattcacaatagccaaatggtaaaggcaacccaagtgtccattcatggattgatgggtaaacagagatgtggtatagccatacaatagaatattattcagccttcaaaaaggaaattctgacacatgctacagtgtgggtgaatcttgaggacattatgctatgtgaaacaaatcagtcacaaaaagacaaatattgtacgattccacttacaggaggcacctagagtagtcaaattcataaagacagaaagtggaatgctggttgccaggggacaggaggggggaaaatggggagttgtggtttaatggatacaacatttcagttttgctagaaaagagtcctgaagctgaatggtggtgatggtcgcacaacactgtgaatgtcctcaacactactgagctatatatttaaaagtaattttgatggtaaattttaggttatgagtactttaccacaattttttttctttttttgttggagtctcgctccatcgcctggccaggctggagtacagtggcacgatcttggctcgctgctatctccaccgcccaggttcaagcagttctcctgccttggcctcccaagtagctgggattactggcattcaccaccacacccagctaatttttgtatttttgtagagacagggttttgccatgttgacctggctggtctcgaactcctgacctcacaagatccacctgccttggcctcccaaagtgctaggattgcacgcatgagccaccacacccagcccacaatttttttaaaatgtaaaacaacaacaataacaactaaaaaaacctgcatccatgagatgaacctgaaaagaaaatatctgttgcaacacacaaagccagtcaacactcttagatatggtggaggcagctttttctctgctgaaattaagggaatgagtgtcctagagaattctcaaagatgtgtcaatgtttctaacaggagttgcagctttttgcctcaaagttaaggacagctgcaccgtcaaaccttgaccatgaatgtttagggtgggttacatttgcccagtatttgtttgactctgttgaataacatcgcagatagatggttttcaacaggcagaagagttttttgtttgtttgtttgttttatctcttgtaggtttttccataataacaaacccaagtaaatcacgacccaaccagtgactggcaaatttagtgcaaactcttcaatgctggttccacatttggcacctggcttggattgatttgccactgagttttgtaaatatttccctcagcttttaattcattctttataaacaatgttgtttaaataaaggatatttgtgtttctcattctgacgttttcttttcaacgtccacttgatgagtataatgtctcccatgaaatttttatttgtagagtaaatattcctttctgtctggtctagtgcatttttatttgaataatgtatcatctgagtaaacatagccttctgtgctctctaaagccttcatcacgttggagggcccttaatatatttattcagtttaaaacttgtctgatgtaagtaatgtcattctggttgaaaagcatttacaaacaaaacaatgatatgccaagctttaatgtttacaaagattagcctggatctcataatagattatttattgtcattgcatattcagtggttttttttctgtaaatattattgagattacactttggaaaagaaaacattactagttttttgagtgttgaatggaatattgcccaactcagcagatcacaatgaaacctcatggttcttatcaaaatcaacaaatctgttgaaatgaatttaatgctaatgtctttgtatgtgatttgctgacctacaaaatgtgttttagttgcttttatttatcttttctttctgcttttaatttcttatttggaggagtcttggttctttttttagtttgtttgttttttgttttttgagacagagtctcgctctgtcagccaggctggagtgcagtggcgtgatcttggttcaccgcaacctctgcttcccaggctcaagcaattctcctgcctcggcctcccgagtagctgggattacaggtgtctgccaccaagcccggctaatttttgtatttttagtagagacggggtttcaccatgttggcaggctggtcttgaactcctgacctcatgatccgcccgcctcggcctcccaaagtgctgggattacaggcgtgagccaccgcgcccagctgagtcttggttcttataattaaaaaaaagtcttctgcaactgttttcattttctacatcttaatttttttggtggtcataattatttttcttatcatcatgactttcttccacatcaatttcgattatttttatattttgaagcacctaccattcttttttcagactaaaatttggcttcctaggatacttcctttttggcacatttgaattctgatgtgattgatatttttgaaaaaaaaaaaaaaaagaaagaagaaaaaagacccagaaaacaaaaaatctgaaattagatcatacacaaatgctttttgaaattgccatgacattgtatttggtggtgctgaaaaattgtgtgatcagagtactcttttgctatcatgattgatgaattgatgggttgaatgaatgtgtacaggaatttagtcactggagcatctgcttcttgttccactcttcagcatcagagggaaattcttatgtgacattttgcctggaacccccagactccctcaggaccgggcaccttgtgacatcttcatcaacaggtgtcctcactctttgtagaactccaccaagttggtctcaagtgaaacagggatgcagctaaattcgaggttacagttttcctgggatgttatcatcacaaacaccatgctagtgagttcattcctaacagaggagaacttgcatcttgactaagcattagtgatcatcaaatcctctgcttatgatttttaaacttctgatcttcagaatatttttccatgagctagctctggctttgtgcatctcaaaccttgtttctctcccatggctgtcatacttctggtgccctgagatgcagaatttatttctacttgatacacacatttgggtattgatgtagggttagtacagcaggtaggttgagaatttctggagcctccctccctccctttgttccgacctttccttagtcatatcatcctagaaagatcttccctggcttcgtctaaaacatggcctctcatttcattctctccctgacaaccctgatgtagttttcatttcaggactcatcaccccaacatcctttcctgtttacagcccatctcccctgctagaacacaagctctgagaggtggaaggcctctattgtgggttttggcgaatccccaatctctagatggtgtctggcatgtgatagagattcaacaaacacttcaacaaataatgaataaagttaaatttttcagagtgcaatcatgcctctcccttcctctgccagggcggaggctgtgcctggtttgcgcggcttctgcagctccagctccttgtactgagtctggagaatgatggagctcagtccattttaatcccatgaacattaaatgcgtggatgtgtggatgctgggatggatggatgacgctcctagcacggcagcttgcaggggattggcgatttccagtaaggtgtgctaagactcgaggaagcccattttctcttcatttgcaaggaccctgtctgataatgcaatttttcacacatcaatgctgtgcatgaggtgttgatggggtggctgtctgctggttccttcccccagcccatcccatcctccaaacagactattttgttgttagctgctctgctctgttcatccctcaagagctctcaccctctgccattgcaggggctgtctccatggaaactgtagccagcgtttccatggagaaagagcccgcagagtctggaattttccaggctctaaaggtgactgcaaaaacatctcagcacatctccagaactgggctgcccaacatggcggccactggccacaggtggcgactgaccacttgaaatgtggccggtccccgaagagacatgctgtcgtggcaaagcacacagtggattttgaggacttggtacaaaaaaattttttttaattgaaatatcgctaataatttttgtattgattagttttacctatcttttttttttttaaacagccgttgctagaaaacttagatttacatacatggttcacatttgtggctgaaattttatttctgttgggtggcattcttctagagtatgagtaactgaatacatgaatgaatgattgatttttggtcaaactgggattattatccataaaccgtcactttcctgcttttcttcttagatgatttgttttttaaatagttcattaagtatcttggttgaaagatttttttttttttgagacggagtctcactctgtcacccaggctggagtgcagtggcgtgatctcggctcacggaaacctccacttcccaggttcaagcgatttttttgcatcagcctccgagtagctgggattgcaggcatgtgccaccacgcccggttaatttttgtattttcaggagagatggggtttcaccattttggccaggctggtcttgaactcctgacctcgtgtgatccactggcctcctaaggtgctggggttacaggcgtgagccacacgcccagctgaaaggtttatagatataatttttagtattgaattaggctaggagttaattacaattctttgaacagccattgaaacaccactaatttttttttaaggaaccatctcctcctgagtgtaagacactgcatcctactgcagatgacgtcttgtacgtagattctacccatcagcttccaacatcttgctgtccttcacaatgttgtcatggctcccatgtagataggcaaaccttcctgattttcatgctgaccagatgcccagaaacaggatcgcggaggcaaagggtgtgtctccacactcggtgctttgataccaatgactcaaatacttaccagaaagactgtgcctacctactttcccactggcttcatctgaaggggtctgtctttatcacagcgatgattttttattttagttttgacttccagattttaaaaacattatggtgacatacacataacacaatatttaccaccttagctacttaaaagtgtgcagttcagtggcctcgagcacattgacattgttgtgcaatggtggtgttatcaccgccacccatctccagaactcttgcaaaacggacagaaagacaaacatggcatgttctcacttatttgtgggatctaacagttgaactcaaggatgtagagagtagaaggttggttaccaaaaggctgggaagagtagtaggagctggtggggaggtggaatggttaatgagcacacacataagaaatgttagcaagaataagacttactaagacctattagataacacaacagggtgactatagtcaatagtaacttaattgtacattttaaaataaagactgtaattggattatttgtaactcaaaggataaatgctttaggggatggataaaaaaaaccttgcaaaactgaaactgtgtacccattaaacaacaactccccattttccccactccagcccctggcaaccaacactctactttttgactctatgaatttgactacttttggtagtggaatcatatagtatttccttttgtgtctggcttatttcacttagaataatgtcctcagggttcatctatgttgtagcctgtgtcagaatttcctttcttttattcatttattcatttttttgagacagggtctcactccgtcacccagtctgaagtgtgcagtggcgtgagcacagctcactgcagcctcaacctcctgggctcaagccatcctcctacctcagcctcttgagtagctgggactacaggcatgcactaccatgcctggctaaatgttgtattgttttttttgttttttttttgagatggagtcttgctctgtcacccagactggagtgcagtggcacaatctgggctcactgcaagctctgcctcctgggttcacgccattctcctgcctcagcctccccagcagctgggactacaggcgcctgccaccacgcccggctaatttttttgtgtttttagtaaagacgggatttcactgtgttagccaggatggtctcgatctcccgacctcatgatctgctcgccttggcctcccaaagtgccgggattacaggcatgagccactgcgcccggcaaatgttgtattttttatagcgactgcgtttcacggtgttgccaggctagaatttcttttctttttaagactggataatattgcattcatggagagaccacattttactcatccacccatccatcactggacactgggtttcccaccacctttgggctatggtgaatattgacttccaattttgctttatcagaagattggagcatcttttcatgtttcttgaaagtttttgctgggtgtggtggttcatgcctataatcccagcactttgggaggctgaggcaggtggatcacttgaggtcaggagttcaagaccagcctggccaacacggtgaaaccccgtctctactaaatatacaacaaccagccaggcatggtggtgcatgcctgtaatcccagctactcaggaggctaaggcaggagaattgcttgaacctgggaggcagaggttgcagtgagccaagatcatgcctctgcactccagcctgggcgacagagggagactcgaaaacaaaaaaacaaaacaaacagttttgctttttctctttcatgaactctcttttcagatccctttctggcttttccaatgtgatgttcagttttaccatcttgacctgttagcacaattgcttgacccgagcaattcctttgactttacaccgcaatgatttcacctggtagattgttaaaccacatttgtgacaggagtcttcatgttcccacatttttagtgtttggatggtcagattgaacgcccttttattttgtgactgttgatgtttggattgttttgaatgagtcatttcccatcacatgattataaacatatcctcccaaatcctattttactgaatatgatttcttcagaaaagaaccctcttcctgctgtgcacaccatgcccatccctgcacccagaaactccagtcctcatgaaggcctccagatcccattgctgcaggagggattggcaccagatctgaattgcacctaggggtccctcgggagaacatgtctaattggaaacgtgtggttcttggaaaggagccgaatggatattgcctcctggcctggtcatcagattatattttagttcaaagactcaccgtggttgatattagctcagtgctcggctggaaaccaaaccctacgtacatctcctctctagcagggagcggttggatttcttggaaacaacttaatattggcctctgtgctgaagacatgcgtttccgaaccctgaaaatatcaaataccaggcatctcctttccagacgacatccttccctcaccttcgttagcttttctcctagttttccggggtggaacctcggcctcgtccctctttgatggactgggtgcctgtgttgagtcctggcccaaagctggtgtttttgtgtgcacgctgcagatttttaaacagaatagccatctgattctggatatgcttggctaacccaaattacacaatgggttgaaatcatggataggtcaatgagaatttcagggtttttttgtgtgtgtatacacgttcccacactcacactttcgcacacacacatacatgtattaccaaatattcgaggaaactgttttcattttcctaaaggcattatttgagtcaaagcattgtgtaaatgaatcttacaggcagcctctccccaatctgaatgcatctcacccccagcccctcctgcctttgtagaaattctgcacagcaaactgcttgcgaatcatgatggggaaggaagttttacttacagagcaaagggaatccacggaagtgatttaagcacgggagagatgcagtcacactttcctttgaggcctgttaatctctaggggaggaaataatttgtatttatgtacatatatgtatatgtgtatacatacatgcacacacaaccaataattattggtcaaagagaaagaacacttctagggttctggacctcaaagatccaaatgtctccccatagtctaacagctccgtgaaaaacatggcttagagcttgctgcgtgtccaggctttttttttccatgcttatctccacataaagttttacataaaattgggataccttatctgcagttttccatcttcctttttatttaatgcatgaacatttcaacatcaggaagtgtactttaaaatatggctttattttgaaggagaaaaagagcttgcctatttgtctctttttcccccgcttttatattttatgttatttttattagagatgggggtcttgctatattgaccaggctggtcttgaactcctggcctcaagcgatcctcccatctcagcctcccaaaatgttgggattacaggcatgagccactgcacccagtctttattttgttttattttattttattgtggtaagaacatttagcatgagatccaccctcttaacaaatttccaagtgtacaatacagtactgttttgtttttgagatgaggtcttactctgttgcccaggctagagtgcagtggcatgaacatagctcactgcagcctcaagcaatcctcccacctcagcctctctagtcgtctagtagctgggactacaggcacacactataggcacatgccaacatgcccagctaactgttaaaatcattttttagagatgggttttgccttgttgccgaggctgggacaatacagtactgctgactccaggtacaatgtagaacagcaggcctcacaagtttattcattgcgcttgactgaaatggactctgtttatgattaggaaaatgccacctgctcactggattcaccattcttggtgaagacggtttatagacttgactgcaaatgtgcgtatttcgtaaacaagactgcccaagtctcagtgatagacattctttgtacatttgagcgagtttccattgaggataaattcctggttatagaattaaaaagtggggcaaagaaatgaaatcagacacaaattgaccgattgctcaccacctataaggaggtaggggctgggatcaacttgtgtttttaaaggagggtcatggctgcttattggagaaggaccttgagggctaagcatggaagcctggagaccagggtgggaatggtccagatggtggtagcttagactagggcagtggccaagggtgcaaaatgaccggtgggacaggacaaagccttaaatgggaacagacccagggatagtggggagagatcctacttcttgaatcccttagagggttccagggaaccaggtccagatgtcagccagcatccttcccgccagggtatccctgatgcatgagctaaacagagtccaaatatatccagttaagtaaggaagagatcagccatggtggctcacacttgtaattctaaaactgtgggaggtcgaggcaggaggattgtttgaagccaggagttcgagaccggcctgggccacataacaagaccctgtctctacaaaaaaataaaaatatataaaaactagccaagggtggtggggcaggcctagagtcccagctactcaggaggctgaggttagaggatcacttgagtccgggagtttgaagctgcagtaggctatgatggcaccactgcactccagccaggacaacagagtgaaactctgtctcttaaaaaaaaaaaaaaaaaaaaaggcgtggtggctcacacctgtaatcctagcaccttgggaggccgaggcgggtgggtcacctgaggtcaggagtttgagaccagcctggccaacatggtgaaacccctatctctactaaaaatacaaaaattatccaggcatggtgtcgggcgcctgtaatcccagctactcgggagactgaggcaggagaatagcttgaacccaggaggcggaggttgcagtgagccgagatcgtgccattgcactacagcctgggtgactcaacgagaccctgtctcaaaaaaaaaaaaaaaaaaaaaaagagaaaaagcagatacgtgcggattcaaaaaccatcccagcacagagcagctgcatcatatatgtctttttgtacaaatggataaggatacctcactccccgccataattctatcagtaatagattgttttcggaggacagacaatgtcatctgggaaaaaccgctcctttagttcttcttatgatttcaattctgttagtggctctcaagagaaataactaagaacggtgaacaagaaaggaaagaggattctttcagctggttgtaagggcactggggagattgagccgcgtgatcacgtagatggtgactgggcgtggggctgcaccgaccgtgcccagcctcccctttagacatttattctccatgcagtaacttctattctttcatttgcagtaatgtagcaatcactgtgtgaatacatcctcgtcttagtctgttcgggctgctatagcaaaaatactatcgattgggtggattagaaacaacagatttttatttctgacagttctggagggaaaatccaaggtgcagcagatttagtgcctagggaagggccacttcctgctgtcttcttgagggagccctctggggtcttgttaaaaattaattaatcaattagtttttaaattgacaagtaaaatcgtgtatgtttatggtgacgacatgatgttttgaaatatgtatacattgtggaatggttatgttgatctaatcgatatatgcctttctacctccccccttttttttatggtgagaacactaaaagtctactgttttagcaatttttacattgtcatgaactatagtcaccacattgtacaatagaccttgtgagctctagggcctcttgtctaggacaataatcccatgatgagcctctaccctcatcatctaatccactcccaaaggtcccacctcctaatactatctcactgggagttaggatttaacatcaattgtggggggaggtggggacgcaaacattcaatctacagcaattatccttcatttgctccgtctcctcttgaggggcattctggctgctccccaccctgattttttattttggggatcagagtcactctgaatgtctcagacagtgcctcacacatcgcctcacacatcactctcaccttatcaatatttactgattggttgaaggttgcagtggacaaccttgtgtatgttcccttgcccacatgatggagaatttcttcaggtgatgtagataggggtggagccatggagaaagcacagtttttttttttttgtttgtttgtttttttgagacggagtctctctctgtcacccaggctggagtgcagtggctcaatctcagctcactgcaacctccgcctaccaggttcaagcaattctgctgcctcagcctcccaagtagctgagattacaggcacgcgccaccatgcctagctaattttttgtatttttagtagagatgggtttcaccatgttggccaggctgctctcgaactcttgacctcaagtgatctactggcctcggcctcccaaagtgcagggattataggcatgagccagcatatttgtttgcaaatagtgcagaatgtctttctaaagaggcattttccttgttttctcttggcagctctgtaagcaaggacctgctttacttttgctctctgccatctccccagcacctcacaccaagtctggtgcatacaaagtcctctatttgtctgtctcaaatatacatgagtgaatgaatgaattattttatgctccaaattggcattgaagtggatagatatatatctagcctgtctttctcatagcatatgttaccatgacatcaaatattcctccagaaatacttgttttgggaagaatttggtttgtgcatcaagactgcaggataaaaggatactcattgtatacacttgttgccaacttcttgctaatgtagacaaaggtgtgctaactcctctgtaccttcctgaatgtttgtgaatgtctgcagacagcagattcccagaagtagactggctaagtcaaagcacacatactttttaaattttggcacctctccccaaaatttggtcactagcatttgagaatgtccattttcctacaaccttccttactctaatattattcttgttttcgatacaaatagaagtcatttcgacaaaacaagtcattttgtcgaaatgacttctatttactttgagtgtctgttttggtattagaagtagggtagactcacgcctataatctcagcactttgggaggccaaggcaggcagatcacttgagcccagcagtttgagattagcctgggcaacatggtgaagtcccgtctctataaaaatatgttcttttttttttttgtattttaccggggcgtggtggtgcatgcctgtagtccctgctccttgggaggctgaggtgggagaattgctagaccacaggaggtcaaggctgcagtgggctgtgatcatgccactgcacactccagcctgggcgacagagcaagactcagtctaaaaaaaaaaaaaaaaaaaagtagtagtagggtggactgtctcttttatgtttattgcacctaaacatactctctggtaaatattctactcatagtctttgcccgtgtttctatcttggtgttcaacttttcctgagtttatattacatttatttatgtatataatttctatgtatctcatatgtttatgttagtgatacaaagttctggatcatcacctctatttttacatatttgacctgggcttgccatttaagtcttgtttgtggtggacgttttccttacacacaacacacacattttcaatttttgtgaagtatagatttattattttatattcgttaacttttgtgtcatatttagtacatctttcttcatcccatagcttcaaaaatattctcttcggttttcttgccatgactgcagaatggaggccacgagcccacttccttgccccaagccctgttccctactcacacggcgcgagcgctgccccccctactcagacggcgcgagcgctgccccccctactcagacggcgcgagcgctgcccccctactcagatggcactctagaactggaatgtcccacagagcagccgcaaaccacagatggctgttaagcacttaatatgtggctgctgtgaattgagccttgccacacgatgagtttcaaagacttagtattaaaaaagaatgtaaaaaatattattacaatttttatattgattacatgttgaaatgataacgtttttgaaacatggggtcaaacaaaatatatcattaaaatgaatcccatctatttcttttaaaagctgatagaaaataaaaatagtaaataataacaatgacttacaaaaatagaaatatctgcccaggcgctgtggctcatgcctgtaatcccagcactttgggaggccaagatgggtggatcctgagttcaggagatcaggatcatcctggccaacatggtacaaccccatctctactaaaaatacaaaaattagccggtgtggcagcgcacgcttgtaatcccagctactcgggaggctgaggcaggagaatcgcttgaacccaggaggcagaggttgcagtgagtcaagatcacgcaactgcactccagcctaggtgacagagcgagactccgtctcaaaataaataaataaaaaaaataaaaaatatataatatatgtattttatatatattatgtatataatagaacacttaaaatgataaaaatggctcatattataatctatcagactcaggtcctgcaagaagaccttggttactgcaggaagaatttgggctcaaataaatagaagttcagatggtagaaatctttctaactggagactcttggtctttgagaagtagtttgaatgtcaacatctcacccagttgccagataaaacctcggttcaacaacccaccatggaatttttccctgattaatgagctaaattctgtactggaatccaagcaatatatatgttgccatccaactcaggaagagactggctttctcggaaagagcacaacccacccagtgttctggagacctctatttccaaaccataaaaatattaaatactagccatctgttttgcagatcgcgtccctgatttccatcattcatcagtttcttttttcctccctctcgtttcctggggtgaacatcctgccccctcattttctgggttcccctcatgaggatctgttaagggacctggcatgaagctgctggttgtatgtgatgcataatgccagcctacttccactgaacaaaattctgttatacattcagagcaaaactaaacaaatgagaattcactaaaatttaataacagctttgttgagatagtcacatactatacaattcatcgtttaaagtacttataagtcaatggtttttagtatactcatagagttgtgaaatcatcagcacaatcaattttagaacatttagaattttagaacatttagatcatcccctaccaaaaaatcccatgccccttagtcgtaactcagcatttcctcccagtgttccccagccccaggcagcacatgaatctacttcatgtatctgtagatttttgcattttgaatcatatgatatatgacttttgggtaagattttttcacttagcttaatgtttttgagctcatctgtgctgtaacatgtatcagtacttaattcttgtttatggcagaataatatttcattgtatgggtgtgccacattttacatatgtattcataagttgatagacctttgggctgttttcacttttggctattatgactaatgctgctatgaacatttgtatagaagtttttgtttgtgtagatgtatgtttccatttctttggggtatatatctaagagcaggattactgtgtctcagggtaatgctatatttaaccttctgaggaactgctttccaaaacagctgcaccagtttacatccccaccagcatttatgaggatttcaatttctctgtcctcaccaacacttgttatagtctgtggtttttgactatagccatcataatgggtgtaaagtgacatctcactgtggttttgactcacatttccttggtgcctaatgatagtgagtatcttttcatgtgcttcttgggtatttgtgtatctcatttgccataatatccactgagaacctttgctgcttggtcacgctacacccaaccattttcgaaacatctgggctatccatgatagtttggatactgagtttatgtgggtacagtggaatcagaaaaaagaaaagttaccagagaatttagttggtaacgacaaatcctttggagagaaccttgacaggacttgctaatggacaacgtttgctgtacctgatcaggtcaactttgaagttaacagaggctgaagtgccggaatcaatccattccagaatgatttctaattaagggtgcaatataagatcactctggctacagggaaggaggcagaagaagggaaagggaaagacagggagatgccaggagacctagctggccactcactaaatctagatagaattagttaattcttccaatatgcttttattaatttatttataaatgagatacacagaaaaatgttaggtgcaaaataaaacacggaaaatttttcagaggataagatttaaaaaagtgaaaatggaagctccaataatttatttgcacacatgacccgttctgagacctcaaaggggtcgcagcatgcgatgaagttgggccagggtaacgacagaagatgggaaggttggggagttacgtggggtgagtggaatggctgaaggtagactctggagaaggatttgatttgatgtgctgatggacttggtttctcattgttggaaacgatgtgagaccaattgatggctgtagttgagaaggaaatgatttggaatgctcaggagggaggtctgggctgttggtggagggggacaaaatcatagagaagtgagttcgtgagtgtggccaggggactggaggagatgtcagtggggattaaaaaaaaaagccaagagctaacacggagtcccgaaagctcaacctggagacctggatgtgacaggagagcccccaggcctgggtctgcagctttctcagagcctgagatctacccagcaccctttcagcaatacttcttgtagatgccagccaccgctagtttctcttgatgcaactaagaattccaatgcaaacaaaatgcagcggctcacacgccctgctgtgctcccctctctgaggacctcatccaagaacatattttaagatatacaggacccattatctaagcacggatggagaaaactgcaggcttgagcccctcccccttgctgcctcaggagcactgattttctgtgaaggacagatgcagcctccagctgttgccatggaaaccagggctgcagagagtgaagttttccaggctctggagtccgttgtgtgtgggtggatgcaagatcccagcctggcatacagcaggcaactaataaatgtctgtagaaggactgaatgtttgtctcctcgactcccaccacacctcggcattctgtgctagaacaatcatcttcttgtgggcctgaaatctgtgaggttgaaattttgtaaaaactccctggatttattgagttataatttacatataatatgatttacctattttaaatatacagtttgatgcattttagtggttgtatacactcatgaaaccaccaccacaatcaataagcagagcatttaattagtctaaaaagtttcttggcccggcaaggtggctcacacctgtaatcccaatgctttgggagtctgaggtgggaggattgtttgaggctaggagttcaagaccagccttggcaacaaagcaagaacctgtctttacaaaaaaaaaaaaaaaaaaaaatcagctggatggggtgacacctgcctgtaatctcagccacttgggaggctgagatggaaggatcacttgagcctaggaggccaaggcttcagtgagctatgatcatgccactgcactccagcctaggctacagagtgagaacctgtctcgaaaaaaaagtatgtatatatatatatatatatatatatatatatatatatatatatatatatatatatatatatatatatatatatatatataaatttaaaaaaaagttttttattagtctgttctcacattgctgagactgggtaatttataaagaaaagaggtttaattgactcacggttccgctggctgtacagggagcctggctagggagaccccaggaaacttacaatcacggcagaaggtaaaggggaccaggcatgtcttacgtggcgggggcaggaggaagagatggggggatgtgctacacacttttaaacaaccagatctcgtgagaactcactcactgttatgagaacagcaaggggcacattccacccccatgatccaatcacctcccaccaggccccgcctccaacactgagaattacaatttgacatgagatgtagggagcggagtggatacagacccacaccatagcagacttttctgtgctaatttgccttggatcccttccctccctccaacccactaccacaccaccccgatctacttccagtctctactgttttgtgactttctagaattttatgtaaatagaattatgcaatcttttgttcaacttttttctcctaatgttttgagatactccatgttgttacatgtattaagattttactgattaatattaattattaaataattatattttattcctttttactgctcagtgatattccataatatggatatatcagtttatttattttcctgttggtggctatttaaactgtttccaatttgagggtcagggggtgcagttacagaattatacagctatcaacattcctttctagcaacattttaagatttgtcccaggtatttgcaaacctaaagtgttgtgcttttctcacaaaaacaatagacatcggtgtggatatggtgaaaagggatcactatacactgctgatgagcatgtcaattagtacagcctctgtggaaaacactatggaggtttgtcaactaactaaaagcagatctaccattccttccagcaagcccacgacggggtatgtacctgaaggtgtctttcatataaaagagacacctgcattcatatgtttattacagcataattcacaattgcagagatatgacatcagtctaagtgcccatctacagatgagtggataaagaaagtgttgtacatatacagcatggaatactactcagccattgaaaaagaatgaaatcgtgtcctttgcagcaatttggatggaactgaaggcccttactctttttcttttttctttttttttttctgagacggggtctcgctctgtcacccaggctggagtgcagtggtgcgatctccgctcactgcaacctccgcctcctgggttcaagtgattctcttgccttagcctcctgagtagctgggactacagtcgtgcaccaccatgcctggctaattttttgtaattttagtatagatagggtttctccatgttgtccaggctggtctcaaactcttgacctcatgtgatccgctcgccttggcctcccagtgtgctgggattacaggcgtgagcccaccgctaaaggcccttattctaagggaagtaactcagcaatagaaaaccaaataccgcatgttctcacttataagtgagagctaagctatgggtacacagaggcagacagagtggtataatggacagtggagactcggaaaggggacaggaagggagaaagggagggataaaaaaactacatattgggtacaatgtacatgacttgggtgatgggtgcactaaaagcccggacaacaccactatccaattcatccacgtcatcaaaaatcactggtattcatagagctactcaaataaaaagatttaaaaaacaaaacatagactggcacacacacaaaataatgtcttgtactttttgtttcattcttgccaattggatagaaggaaaataaatggtctccctgttgacatggctgcccaatttttggattacaaatgagatgaacaatccttcatcgttctttgaagtgactttctctctctctctctctctctcgtgttttttgtttgtttgtttttgtttgttttttttgaagtcttgctctgttgccaggctggagtgcagtggtgtgatctcagctcactgcaacctccacctcccgggttcaagcaattctcctgcctcagcctcccgagtagctgggactacaggtgcacaccaccacacccggctaatttttgtatttttagtagagatggggtttcaccgtgttagctgggatggtctcaatctcttgacctcatgatctgcccacctcagcctcccaaagtgttgggattataggcatgagccaccacacctggcctctttgagttatttttaaatgtacaaataaattattattgactatagtcacccaattttgctatcaaatactaggtcttattcaccctttctaactatttttctgcacccatttacaaccccacttgccccccaacccccaacccatactgccttgtgctgaagaagaagatgagaccattggcccctccctggcccaaacaccattcccccattccccccacattgaagcgcccagacctacaaggaggctttcagctcccggtcctgcatgaggaatttggaccaaatccaaatagaaaatggggtcagaagggaatgacatttctaactgaatagccacggtccctgagaagaagcagttacaacgtcagctgccagataagacgtcgggtcaaggacccaccgtggaacgtccccttggttcctaagccaaatgcccagctggaatcccagcaatacacatgttgccttcagcaagggaatgattttctcataaacagcacagcctggccaaggttctggagacctctgtttctaagccatggaagtattttatcctgggccaggcgccatggctcatgcctgtagtcccagcacttttggggtccgaggtggttggatcgcttgaggcctgggcaacatagaaagacctcatctctacaaaaaaaaacaaaaattatccgggcatggtggcacacccctgtggtcccagctactctggaagctgaggccagaggatcacttgagcctagcaggtcaaggctgcagtgagctgagattgcgcccctcgctccaaactgggcaacagggagagacactatctctaaaaatatatataaaataataaaacaaacaaacaaatattttattctggttgtcattttgcggattatatcccctggtcccgtcagtaatcattttggggcagttttttttgttgtttttttgggggtaggtgtgaaaatctttccgcttcataatattccaggcatcactgatgttcagccataactccccccacccctgaatatgctcatggaactaaatttccataacttgttggattccgtgaattaccaaaatcagtaagaatggacttttaacacttcatcttagtctgaattaagttcacacacatagctgtctgcacagggttcgtctgccttttcccataacaattatgtcagcacgacctcacagcaaagaccacattgctccctgtcatgggctgaaatgtgtgcccctaaactcacgctggaaccctactttccagcacctcagagtgtgagcatatttgaagatggggtctttacagaggtgatcaagttggaacaagatcattagtatcatctgtgtctcctgattcactatggctggagcagccaggtgtggtggctcatgcctgtaatctcagcactttgggaggcggaggcaggcagatcacctgacatcaggaattcgagaccagcctggccaccatggtgaaaccttgtctctactttaaaaaatacaaaaagtagccaggcgtgatagtgagtgcctataatcccagctacttgggatgctgaggcaggagaatcacttgaacccggaaggtagaggttgcagtgagccgagattatgccattgcactccagcctgggtgacagagcaatactccatctaaaaaaaaaaaaatggccaaagccctgatcaagagaggagatgaggacagaggcacatacaaagtgatgaccatggaaggacactgggagaagatggctgtgtctatacgctgaggaaagaggcctaaagagaaaccaaccctgctggtaccttgatctctcagccttccagcctccagaacagtgagaaaatgaatttctgttgttgaagccgccccgtctgtggtgttccgttgtggcagtcctggcaggttaatgcacgtacccaaccagagtgccccaaacccttcctacgtagcaattctggagcttagacagtctgtggatcatagtaaggaactaggtctttatctgacagtgacatgaatctgttgacgtgttttagcccgggcagtggtcacggatgccttttcttttaagacagtccatgttggctccactatggatgaaagccagggctggtgcatggcagagacacacacagaggagatttgggggacacaggacagagaggataggtgcccagacgaggtggggtagggggaatgacggagacagagctggctcaggggatgtccaggaggcagaactgacgaggcctggacgctggtgggattcggtgggtggcttatttcatgtgtccacctggccaggctccaaaccccacagtttccgtcaaaccctcatccagctgtggctgcgagggcattttacagatgcagttaacatctacgatagctgactttcagtgaaggagatgatcctggaggatgtgggtgggcctcatctcatcagttgaaggccttacgagcaaaaactgagttttccctgaggaaaaataaattccacctcaaggttgcagcattagctcctgcctgagtttccagcctagcgtcagtcagccccacagatgccatgcctcccagacttcaaaatcgtgtgagcgattgccttacaatgagtctcttaaaacagtggtttgcaacctttttggcaccagggatcagtttggtggaagacaattcttctgcagaccagggtggggagatggctttgagatgattcaagcacattacatttgttgtgcactttatttctattattattacactgtaatatataatgaaaaaaattatgcaactcaccagaacatagaattggtggggagccctgagctcattttcctgcatgctcccagctgggagtgatgggagacagcgacagatctctaggcattagattctcataaggagcatgcaacctggatccctcacacacgcagttcacaacagggttcgtgctcctatgagaacctaatgcggctgctgatttgacaggaggtggtaatgtgagcaatggggagaggctgtaaagacagatgaagcttcactcactcactcgctcacccacccaccctcacgtcctgctgtgtggcccagttcctaaacaggccataagccagtatgggtccatggcctgggggttggagacccccatctttaaagacaaaaattatatatatgacatatgtgatatatatatgatatatatacacacatatgcgtgtatacacctattatcaatatccccccacacatatatacatataaatatgcatgtatttcaccccatacacatatatgcttatccccccccacaaatatacttataaatatgcatgtatccccccacacacaaatatacatagaaatatgcagtattccccccaaaacatatatgcatgtatcccccacagacaaatatacatataaatatgcagtatttcccccccaaaacatataaacatgtatccccacagacaaatatacatataaatatgcatgttatgtcctacttagtctgctagggctgccataacaaagttccacgtaccgagtggctgaaacaacagaaatgtgttttttcacaattctggaggctggaagcttgcgatcaggtgtcagcagggctggtttcctcggaggcctttctctttggcgatcagacggccgccctcccggtgtcctcacgtgggctttcctcggtgtgtgtctgcatccacacttcctcttctgttgaggaaaccagtcctattagattgaggtccatcctagtgacttcgttttagctcagatgcctctgtgaagaccctatccccaaatacaatcacagtttgcggtgctgtggggttaggacatcaacatatgaattcagggagtctacagttcagcccatagcactactgggtttgtttctctggtaggactctgacggctacaggaacaggcaccatttctgccttaaggaactaggtggacaacctcaatccctgagaaagggaaggatttttgaaagcataatgggttcaacttagctgggtggagacctcctaagaagaggtaagagtcttgttctttctctgtaaaaggaaaatggttttctaacgttttactgttccagagaaagacaaaacgcccaacctccatttacatctgtctcagcgcgcctcattaattccctagaaagaactgctggaagttgaattactgggtcaaagaggataagaggtcctcgtgatttggttatgttactgagttttgttccaagtcaggcagcttggccataactcctgtttatttatcactgcatttctgtttaatcattttcactgcacagatagcatatcaatttttacttggaaattgaaactatatatatttttacaatttatcatcctgtattttccctcatgaggctgtccccatgatgtaaaatgatccaaaattttgattgcattgtccggaggaaaggcatttgttattttctcttaatcattttagtactgacttttcatacgcccttcttgtgctttatagtcttgtttccaagcacttcattttacaaacatgccgtgatgttccccttctatctgcgccctgtgcctttgtgtactgggactcattttttggggggagacagggtctcactctattgcctaggctgatcctgactgctggcctcaaacaatctttctgcctcagcctcccaaaatttgggggttacaagcaagagccatggtgcccagcttgagttacattctttaaaaatcaattcattgcatttggccttaatgggaagaccaaagcgagatgtatcatgaacttgaaaactacagtattgacaacctgtttatcagaaaggttcagaaaaattcctctcccaccatcagtatctcaaaccatccccacctcaactttgcttcctggtggtattagcaaattcaaaggtggtgaacatgaaagacatgtgaaatgttacagtgctgtggagatacggtatcgctagtcatttatgaatccacctaccatcattcatccattccacccatccacccactatccatccatccattatccattcatccatccatctatccatccatcctctgtccattacccattatccattcatccttccatccatctatccatccatcatcccttatccatccatccatccatccatcctccatctatccacccatccactcatctacccatccatccactcatcctccaactatctactatctatccatccacccatcaacagaggagccacagagggaagtactggggctggtcaggaagcagagggagtgagggggaaatgtgagcaggagccttttcgttatttccaagggagggaacgggtgaagcagagtgggcaggcttaggattggctcctgtgagtgatttcagtggctctgggtcacaggcactgtcctggttgtctggttcccaaccctgggtgatgaaggcatgcacacagaggccctgagtgtgggagcccaatggacggggtgctgggtgtgggctctggatggggtggtttgcatgtgaaaggcaccatctcaggggggttgtttatcatctttaggaaaatgtaaagaatcaaagtacagaaatttacacaggcgtggttgatgcaccggggagtggaatgggtcagcccaggcgaggatggggcatgttggacagacgcagctgggtgtggaggcaggacactgtcagaaaaggctcctcatggctcctctctccttagcggccctcccttcagcttctcaatctttaatgtgcattctaccccactctgggtctgatttagcaggtctggctggtgcctagtattctgcatttctctctcttttttttttcaagacggagtctcgctctgttacccaacctggagtgcagtggcgccactgcaacctccacctcccaggttcaagtgatcctcccacctcaaccttccaagtagctgcaattacaggtgcccgccaccatgcctggctaatttttgtatttttagtagagacagggtttcaccatgttggccaggctggtctcaaactcctgatctcgagtgatctgcctgcctcggcctcccaaagtgctgggattacaggcatgagtccccgcacccggccattctgcacctctagaaagctcccgggtgttgagaatgacagactttgatggtttgcctgagacgctctccattttagcagggacccaaggagcccccggccccgggcaaaccaggatggttggtggcttcactggtgacgctgctggtactggtactgggccacattttgagcagaaatgttctgttggagtctgcccttcccaaggcaggagctcagagaaaaaggagaaaattttcactctgttccctgctctgctcgggctgacctttcctcctggtaaacatcgtgttttctcctttacgcaacatgccctcaacccacctgaggccacgtccagtgtctggacatgcttggatatttttccctctggacagttcctgaccttctagatacatttcaacatgacctctgtctcaggttggggctcgccaaccgtgcatgtgaaggcatgtgctgtctctcggccgcccaaggcatggtctttgcattctgtccgtagcctgaacaatcattaaccatgcaattgccctcttttctgctcatcatgggccccaaacccctccgtaaccactggaagccatcgctctctgctctccacaaggcaaaagggtgaaatattttaataatcatacagtgtgaaacatctcaccgaaaaaaacacagcaacaaccaacacatgtaaaagacaagactgatgaatctgactctatatgtacagaaaatatcagcagctggaaaaaatataccaccaaaaaaaaaaaaattgaacagagaaactggcaaaagcagatatcacagagttaaactttacaggttaatatataaagcgtataaagaggtcagaaagacacaagtggaagaccaaaagcgaagagtgggcagaggatgacaacaggctgctaataaaagggaacatttaaacgtttaggaaagatgaaaagatattccactttatttatagtctactaaacttggcatcgaaaatcaaaatgagatatcactttctaccactcagacagaacaaggtttataaaatagcacatggagtgggcaaggtgtggcatgtggaaacggggtcatccgctggctggcggtgaaggcgtggattggcacatttctgatgcgtattttagcaataaatctgcaaaagagccagtcaacagagtcccttccagcagaacaaatatagggaagctgccttcctactgggcacttcaggttagtaatcggagaaaagcaaacaagcacgaaagaaatagaagagcgatttggcattatctagaaaagctacaatcggtggctctccattgtgggatgatttcaccccctccactccgggaaatatttggaaatgtgtagagatgttttttactgtcacatctggggcgtgagtagggagtgaactactagcatccagtgggtagagaccagagaggctgctaaccatcctgcaatgcacagcacagccctcatcaacaataaagagttaccagcccaaaatgttaatcacatcaaagctgaggaggctgccgtattgcccagcaattctgttccaagatatatgtcccaggggagctccctccattcccacaaggaccaagcataatcgtgctcattgcagtactcactcactcagtgcagatctgttgaatgtgaactgtagcccagtcactttgccgtgatgggggctattcacagttttttgggtttttttttgagacagggtctcgctccgtcacccagggtggagtgcagcagtgcaagcctggctcactgcagcctccacctctgagatcaagtgatacccccacctcagcctcccaagtacctaggattacaggcgtgtgccaccatgcccagccaattttgtctatctttttagagatgagtgaggtcttgctgtgttgcccaggctggtctcaaactcctgggctcaagcattcctcctgttcttggcctcctgaagtgcagggattacaggtgtgagccactgcacctggtctattcatattctttgtagtgaaaaaaagtgggatgctgggagaggaacaactgaaatgtctattgaaaagagaatggataaataaattgtggtgtattcgtaaagtggactgcagtacagaagattaaagaatgagaggtacatgtgtccctgtggaaagagcgcaatggatgagagcaagttgcgctgatagaacatccaccctttagcctggcgtggtggggcttgcctgtgctcccagctactggggacactgaggtggaaggatcacttgagcccaggaggtggaggccacagtgagccatgattgtaccactgcactcctccctgggtgacagagtgacaccctatctcaaacaaacaaacaaattgacaagagaagaaggaagggagggagggagggaggaaggaaggaaggaaggaaggggagaaagaaagaaaagaaaagaggaaaggaaagaaaaggaaaggaaaaaggaagaaagacacccaccctgttaccaaccaccctcccagatctgtctgttgggttgcactgatcccttgcagggaatcgtcttcttactttgtgagtttacagctcagctccgtgtcattattcagagttactgtaacaatgcaattcacgagaagccctgaatgaatgccgttgtggctaccatcaaatgttgacacagcgttcaaccccatcgagaggagatgcattactcaagacatctgtagacagggatggaggactggaagaatgaatgaagtcattcattctttcaacaaacttgaagcacctgaggggttcttgcctggcactttgaaccccctcctttccacccccaaacacacaaacacacacacacacacacacacacacacacacacacactgatatcagagcccagaaaattccagtctccgcagctccttcttcagccctccccttcccgcctccagctgctgtgtccatggtgacagtctgagcaggcctgggttgccgccgaacaggtgattgctcttgaaggaaaacaacaccaagccactggggggatgggaggcagtggaaatggctcaaaccctggccccacagctgtggcctgtgcaggacccgcatgtccctgaaaatgcatccttgagagctttgcaaaagatcacgaaatcggccatgagggcctccctgaccctgtcagagataatacatctcttaagcatgagtgacattggcgttagctttttttctacttgttcatttattcatatattcaacaactatgaactgactgtcctgggagctggtgatacaagaataaaacaaacagacaaacaggaggcacactctgatctgatagagacatttgctccttcaaagaagatttttttcattcattctggatggacttacggaagagccgctgcatgctggggccatgctgggcacagaggatgcaccacaaagagagagagagagagagagagagaggaagagaggaagggaggaagatgggaaggggggaaggaaggaaggaaggaaagaaggaagaaaggaaggacggaaggaaggaaggaagggagtcaaacaaagtccctgctttctgttaaagaacaaagcattcgatgagacttgttaaagcatgggaaggaacaagatttaggaccatagtgatgggcatagacagactgcgacaaggggattttgcagtgggggagagaaacagggtgctcagctctgaatgcagcatgggcaagagagaatctgtagccaagaagcagggtgggggtcagtggatggaaaattactgagaggaacatctggggtttcctctggctgagaactgacctaacaggattcttgttgaagacaggctcagggtgagttgcccgggggaggctgaggatgagggacgtgaaagaacctgtcactccacagggattgtcgtctagttggggagagacatggtaaatcagtatatatttttgttttcttctgtatcctcactgcctagcagaatgcttgggatctagtaggatcttcacaatcatttttcagattgtgaacaaatgaacaaataaatgggttctgtggagttcacaattcaaattctggtgcctttattcatgtaccacgttcatagcatcctttctcctgagagtatccaaggttcctttcttgggtggatggggagttggctggatatggggcatcccggacaaagatgcaactgcctttgcaaaaactatatcagtgagaaaattctgacagtgaaagagatctgagctaacccacctcccatcttgcctttcccttagttattcctgggctattgggccaagctgactttggaagacatttgcgctacagtgtaaaagaataataggctttgcccaaaactcaactgcttttgtaaagctaatgggaggctggccagtgtggtggctcatgcctgtaatcccaacactttgggaggctgaggcaagagaattgcttgagcccaggagttggaggccagcttgggcaacatagtaagaccttgtctctacaaaaaatataaaaattagccagacatggtggtgcacccctgttgtcccagatactcaggaggctgaagtgggaggatcacttgaacccaggaagttgaggctgcagtgagctgagatcacgccactgcactccagtctgagcaatagagtgagacttgtcttaaataaataaataaataaataaataaaaataaaaagctaatgagaggtcagccggtctcactgtgttgcccaggctggtctctaactcctgggctcaaggaatcctcctgcctcggcttccaaactgccaaaattacaggcatgaaccactgctcgcagccccaggcagaaaattcttgaagcaatatctgaccattcatctctctttcttaaaaaactttaacgggcctggcgcggtggctcacggctgtaatcccagcactttgggaggccgaggcgggtggatcacctgaggtcaggagttcgagaccagcctggccaacatggtgaaaccccatctctactaaaaatacaaaaattagccgggcgtggtggcaggcgcctgtaatcccagctacacaggaggctgaggcaggagaatcacttgaacccgggaggcagaagttgcagtgagccaagatcgcactgctgcattccagcctgggcaacagagtgagactctgtctcaaaaaaaagaaaaaaaacctcaacatattccattgctctttagattaaaaacttaattcttaatcaagacctaccagaagttgcagctccagaattcccacatggaagggacttggagggaagttttgggtcagagtggaggccactgtggggtttgccgtgttcacaatgccattcatttgaatcaatgctgtctgccatgaaaagtgtacaagaaagtgaaggcatgaagaaatcaatgtccaactggcattgacttctttttatttcaaattagtataagaaataggccaagaagcacattaggaaacagaggatatgacggttaattttagatatccacttggccaggctgtggtgccatgcggtttgatcaggcaccagtctagatgccgtaggtgctgagtcgatgtaattagcatttacagtcagttgacttcaagtaaagactagtctccatcgccttgatgggccttatgcaatcagttggagatggactgttttttccaagaaaaaagaattctgcctcaagactttaacatagaaaccctgcctgaagttccagcttgctggcctgccctgcagatttcagacccagggagcaatatccactgttccctcagtccccagcctgctgccctacccatcgggcttgccaagcccggcaattgcaggagctaattctctaaaatagattcctcccctcccctcctttcccttcccctcccctcccctcccttcccctcccccctcctctttccccctcccctcccctctcctctcctctcctcccctctcctgtcctttcctcccctcccctcccctcttctcttctctccgcttctcccctgtcctgtcctcttctcctctcctctcctctcctttcctcccctcccctcccctctcctctccgcttctcccctgtcctgtcctcttctcctctcccctcctcttctcctctcctctcctcctcgctcctctctcgtgtctcctctccccacctctcctctcctctcccttcctctcccctcctgtcctctccccttccctcccctcccttcccctctcctctcctcccctctcctctcatctcctttcctctcctcctctgtcttcccctcctctcttcttctctcctcacctctcccctcccctctcttctcttctctctctcccatgcatgtctcctcttctctctatacttctccatcttcctctgtctctgtccctctccctccctaccttcctccgtatctctctgtgactctctctctctctctctcacacacacagacacacagacacacacacacacacacacacacacacacacacacacacactgttggttctgcttttctgaagaaccctagcacagaagggtattgtgcgcacaagctgacaacatagacacaccaacatctgctgcctgccaggccctcaggacaggagaccagaccagtctgtagatatcaagggagtgagacccaccccaaaatgtggagaaaactggttaacaacctgatacatggacgtggatgacagcagaatggctggtagtcaatattcttaaactctttgtatgattcggaaacaaacctctctaaagctctgtctgtattgtgctgtttctgagaaaattgttccctccttgtaccctgggctcttgttgaacataccacggtggatctttgagctgaaactttgtttgggtcctgggccagatatgaacattttagccacttctccttcaccaccaggagcatccccgtggcaatatctgtcccatccaaaccctctttggccctcatccctcccttggcgttggtgctgtggtccccggatggtttagactctatcagaggaggagaaggaggcacatccttaggacagggagacagctcgtggcctcgacttccctcccacaccaggacactcaggagaatagtttcataatttgggtgcagaaagtcttagtgagcacaattcttaaaagcttacaatcattaaagataagaagaattaaactgactccataagagctgaaaaaggcctggcacggtggctcacacctgcaatcccagcactttgggaggccgaggcaggtggatcacctgagatcaggagttcgagaccagcctgagcaatatggtgaaatcctgtctctatcaaaaatacaaaaattagctgggtgtggttgtgggcgactgtagtcccagctactcaggaggctgagacaggagaatcgcttgaacccgggaggcagaggctgcagtgagccgagatcatgccactacactccagcttgggcgacagagcaagactctgtcaaaaaaaaaaaaaaagctgaaaaagtaggcacagaataacaaaaatgtaaaccagaagaaatgataaaaatgggtgaaactattttcaacctaatgagattcaaagaaactatatagtttacatgtgaattgtgtttacaagaaaagaatttaaaatacggggtaacataaactttaaaatccatcaaaagagcaacaggtaggaacagaaaagccttaaaagataaaataaaatgtgccaaataaggaaaatgatgtttcgacctttcttgtactccaaaaaaatgaatatgcaaaccatactgggaagtcattctttctcttgtcagatggacaataaggaaatagacaagcagagttgactatggggtgagagcggacgccttctcaggctgctggggagagcgagttgctgtgacctttctggcaagatcttttggcagtagacttcaaagtttaatatctgcatgccctttgacccagcaaatccacttctgggaacccacctccccacagacatacacaaaagcacaccccacacacacacatggtcatggcagccttgccagagcacgatcagccgaaaagtccatagaacgtgcatctgggttgtgtgaagctcaacactgatgcagaattttacagtccaaagacatcagccccttgttagacaaatgagctgtgttttgaaggtcatctaatgttaagatgtatattacataagcaaaagttggattaaaaaacaaaaatgcatcattatccaagtttgagcaactgtaatacatttatgcatccatttatttattcagcttctaaaaaccattgatgctgggcatggtggctcatgcctgtaatcccagtactttgggagggtgaggtgggcaaatctcaaacctgggagtttcagaccagcctgggcaacatggcgaaaccccgtctctacagaaaaaaaaaaaaattagctgggtgtggtggcgcctgtggtcccaggtacttggggaggctgtggtgggaggatcacctgagccagggaaggttaaggctgcagttggaggttgaggatcacctgagcctgcgaggttgaggctgcagtgagccatggggatgccactgcactccagcctgggcgacagagtgagacccagtctcgattaaacacacacacacaaaaacaaacaaacagaaaaaccattgaacactcacgctagatattctatcagggagagaggatgtggcagagctaaaagaaaacagagtgtgcctgctttcacacaacgtccatttcactgggtgaaaatcacagaagaatataagtacaagaccattttggagagcaatctgccggtgtctaagaacgctgatcctatgtgttcccctatcgcccagaaattccagtttgagatttgtgccctagagaaactctcacacatagggcaaggaggcaagttcaaagatgttcattgtgactttcattgatttggcagatattgattgagcagaaactgtggactgggcactgctctgggctctggggagatgtagcgttgcttgtgatggccaggaaagcaggaggagaggttacatcccaagtgcctgccaatgcgagaatgggtgaataaactgagtggaacgtgaagagcggggagagattgggatcaagttgcagaaggatcagtccacagaacagtcctgcgcagaccctctctcagagacctggttaatgtgctttgtggacctctcaactctgaaattatttctgtcctctccttttttcccagtttttaaaattgtggtaaaatacacataagcaggccgggtgcagtgactcatacctgcaatcccagcattttgggaaggagaggcaggaggatcatttgggcccaggagtttaagaccagcctgggcaacacagtgagaccatatctctaaaaaaaaaaaatttttttttaaattagccaggcagggtggcgcgtgcctgtagtcccagctactcagaaggctgaggcgggaggatcgattaagcccaggagtttgaggctgcagtgagctgtgatcacaccacacactccagcttgggcaacacagcaagaccttgtctcaaaaaaaaaaaaaagccataatataaaatttgccattttaactatttttgagtgtacaactcagtggtattaaatacatttataatcttgtgcaaccatcaccaacatacatccccagagcttgtttcatttgtaaaactgaagctctgtccctgttaaacataactccaccgtcccccttccccagcccctggcaaccactgttccgctttctgtctctctgttatttgcctactccaggtaccttatagaagtgaaatcctacaagatttgcctttttttttttttttttttttttgtggcagagactctctctgtctcccaggccagaatgcaatggcgcaatcttggctcactgcaacctccacctcccaggttcaagcgattctcccacctcaaccacccgagtggctggaattacaggcatgcgccaccatgcctggctaatttttgtatttttagtagagatggggtttcccatgttggccaggctggtctcaaactcctgacctcaggtgatctgcccaccttggccgcctcccaacgtgccgctaatagaggcgtgagctaccgcacccggccggattttcccttgcgtgactggcttatttcacttagcctaatgtcctcaagcgtcatccacgttgcagcacgtgtcagaacttctttcctttctaaggctgaataatagcccatgttccgtttgcccatcgttcgttggtggacaccggggctgtttccacgttttagcaatcgtgaatattgctgctgcgggtgggggcagagctgtctctctgagactctggtttcaactctttggggtacgtggtgactccagttttaattttttccagctttcccttctctttgtgccttcagctggagtcattctggatccaactaagataactcatctgagcaggtggactgactgtgtggctcccacggacacagccacaaggagaaagttctcttggctcagatagaggtggggagggggtgcagggctgttcgttttctcagaaaacttgtaggaagcacctgcgttgcactaggcgggcattttgatctcagcacacttccagctccagacctggacatttgcagcctcctgggccttcactctggttcctcagcccctcccctcctctttggctatggtttccacggcaacagccttggcccgggcctgcctggggcctgcatatcagaggacagtgcttgagggaaaacatataacaaccgcccccgctcttccaaagaccgagaccggctggggaggcgtggacttgcggggcagggggctcacgctgcagctccgcctcccccatcgctgggtcagtctgaccccgttagctctttcctgtgaatcctgagaggcggtccctgagaagcgaaagcctcctgcaagagccggtgatgtcagtctcagcttttccacaccccttggttcattccacacatccattgagcaccactgagtacctgacgctggtcctgaagacaggggcgcaatgctgggtgttctcagcctgagactttcacatcccagacatttgtctgccagacacatgcattgaatcactcgaccaatacggactgagggctcagcagggcaagggtgggtgccacaggaaccagccctaggcagagatccctgcctccttggggtttccattctagtggggagtacacatggtgagcacagaacacataaagtcacagcacgatgagcgtggccaagaaacatcaatcgggggagagacggagtgacctgggcaggctgttttaggtaggcgtccgggagggcctcgagaccatgacgagaagtgagggaagggagcagagggacgagcattccaggagaggaaccagcaaggccaagagcttggaggtgggagtttgtggggacatgcctgtgtgagggaagccagtggcccctggcagcaagggctcacaggaggtgagggctgagtcagtaaggggcaaagggcatcctcctcctactcctccctgcttttcctcctttccctgcctttcctcctcctccccttcttcctccccctcctcttcctcctctttctcttcctccccttcccctcctcctcattttcctactccacatcctaatcttcctccccttccctctcttccccctgccccctctttctcctccttctcctccccttcatcctcctactcttccgccccctcctcctcattttccttctcctcctcctaatcttcctcccccttctgccccccttcctcctactgatcttcctcttcttcctcttcctctccttcctccttctcctccctcctcatcctcctctttgtcctctcctttttctaaaaagccttttaacttgcctggccaacacagtgaaaacctgtctttactgaaactacaaaaatgcaaaaattagccaggtgttggggggaatgcctgtgatcccagctactcgggaggctaaggcaggagaatcgcttgaacccaggaggcagaggttgcagtgagccaagatcactccactgcactccagcctgggtgacagagagagactctgcctcaaaacaataaataaataaatcttttaaaatgtgaaaagcattcttagcactctaactgccatggttttcacactcctgaactacagtatgattccgatagcacgtagtacattttatgtatgcatatatgtgtatttacaaggccaagaaaataaatagcaaaataaaaatatgattacttccagactgtctgaatatgaagtaaaaactggtattttaaattaaaagcgttaacaccttttattctcttggatccaataattctacatccaatctttttatctttttcatttctctctgaggatttcatatgatgtggtcaagttagtgtataaggctgttgttctacctttctgtggaacagtgaaatactgacaaccttattctctcttcccagaagaacaccatggcttaatcaaaaacttcttggctgggcacagtggctcatgcctgtaatcccagcactttgggaagccgaggtggggagatcacaagatcaggagttcaagaccagcctgaccaacatagtgaaatcccgtatctaccaaaaatacaaaaaattagctaggcatagtggtgggctcctgtaatcccagctacttgggaggctgaggcaggaggatcgcctggacccaggaggtggagcttgcagtgagcggagatcatgccattgtgcactccagcccaggcgacagtgcgagactctgtctcaaaaaaaaaaaaaaaattctttcataggaggaacttccagaaaaccaacacctagtgtatatttaaatattcctcccggctgggcacggaggctcacgcctgtaatgccaacactttgggaggccaaggagagtggatcacctgaggtcaggagttcgagaccagcctggccaacatggtgaaaccccgtctctactacattcaaaaaattaggtgcagtggcgggcgcctgtcatcccagctactcaggaggctgaggcaggagaatggcttgaacccgggaggcagaggttgcagtgagctgagatctcgagccaccgcactccagactgggcaacaagagtgaaactctgcctcaaaagaaaaaaattatatagatatattcctcttctcaaggaaagaagcccccaccacccagtcccagttccctgagacagaaactggggaatccctgactccctgtcacaccctggacatccagccgccggggctgccaggtacttctccgggtggctcctgagtcagctgagactcaggagtgtggttctccctctgcccaccccttgtgctcttcccccgggacccatttcccgccacctgcacccactatgcttgactttcatcagttgtccacacagaacacggactggaatttcttacaggaaaatctgaaccatggccctcccttgcctaaaacacctcaaagaatacactttgcattttatataaatactcgaattcttctcaagattcacaagctgttggagctctagaatttctacatgggagggagtaagagtagcaattgagccacaatagggatgcttggaggcttgccttgaagctgtgttcacaaaatgttgtcaccagttgtgggagggaggaaggaaggaaggaaggaaagaaggaaggaaaggagggggaaggagggaaaacggcttcttttacagtatgtttctgtgggtacacacacagaaagcaaggttatgaaatcataaaggttattcttacatgttatatctcacttattatacatatgttatatatctcatttattttaatcctcattcatttttactttaattcaacactatacagaattttggaaatgggtttgcaaggcccccataaagtcacttagtacaggaactaaaaccaatagaaattagagccaaggtttttaaccccaggaaaggagagagaaactcatttacaactggagccagggacataatctaggaaacagacacctagtattaaatatgtttatgaacatattgaaaatgaacaggcccagaatcctggccacattttactctttccgagaaagccattcccttcctgagtgagaaggcgagagagggagattcagagagattttgggcttcaccctggcattcgggacattaatcagggaaaattccaagtaggttgatttatctggcacttggctgaatgttgacattcttacagcctcgtccaaaaagccgtgagattccgggagaaacttccctctcatgggagccctcctttcagtttaagtctggcccagattcctctgtgagcaactggagccaggaccctgctgaacagagtttctctgtgggcacaaagtgcactcaccattgccttttctcagcttggtgtgagagggtgtaagtgttcttatcatcacagacaggcaagacattccgtttttaaaaggtaaaaagcattcttagccctctaactgccatggttttcacactcctgaactacagtataattccaatagcacgtacattttatgtatgcatatatgcatatttataaggccaagaaaataaatagcaaaataaaaatgtgatgacttccagactgaatatgaagtaaaaactggtattttaaattaaaagccttaacaaattttattctcttggatccaataattctacatccaatcaagtatgaaagaaaaggtacatgcttcttaccacatagagacaatgagataccacctcggacccatcggcagggctactgtcaaaacaaaccaaccaaccaacaaacaaacaaacccagaaaatagcaagtgttggagaggatgtggagaacctggaaccctgtgcctggcaggtgggactgcgcttctgatagggtattcataaagcagaaaaatgccagagcttgggcaacatccacaaagctctcacctcacttgtaatccaaaaactggatgccagaccaggtgtggtggctcatacctataatcccagcaatttgggaggctgaggcaggaggatttcttgagcagaggagttcgagaccagcctggacaacatagtgaagccccatctctacaaaaaatacaaaaattagccgggcatgatggtgctcatctgtggtcccagctacttaggaggctgaggtggaaggatcagcctaggagtttgaggctgcagtgagccaagattgtaccactgcactccagcctgggcaacagagtgagaccctatctcaaaaaaaaaaaagaaagaaaaaaagaaaagaggatacccaaaccgaattgaaccacagtttccactgtatcctatgggtgaagatgaaaatgcagttggcaggggctggggcaggcacgtgtgtgacatactgcgtctgttcagcattttggggaatgagttcagactttaaaatatgttcactctttgacccagcggttctgcccctgagtgcacaggacccctagtccccaccttgtggtcattacagtgatgtttatgaggcgactcattaaaagaagggatgtcgtggctggcagtcaacagaagaaagcaattttgtataaaacaacgtgtgtttcttcagcatcctgaacgccatgggtcggggtccccaggggcacctccaagtttcatgactcactggaaggactcacagcaaaagaatgaaaagcaaagtcagcgagggggaatggcaccgagagccctcttcgcgggagtcacacaggaggcaccgattcctccagcaaggagttgcaacaacacctgtgaaatgtcatctgctgcggaactcattagagactcgatgtccggggcacttacttggggctggtcacacaggcacctgctgcctggcatctaccagaattccagacgcccagtaggaaggcggctatttagcataaaccatgctatttgcataaacagtgtggacacagtgagacaccagcccaagggccaacctgctacataaaatctttcattgcccgtcgtaatagcaagataaaccaggataaagacttatgtatagacttaaatcccaacgctgagtaaaaatattccatttactcatttttttcttcacaatctagtgatgcttgatgatggtcacatgaaaaagagcaaacatagtggatgcccctgccttcctgaaacctccctgatttatttatttatttatttatttatttagagacggagtcacgctctgtcaccaggctggagtgcagtgctgcgatctcagctcactgcaacctccgtctccccggttcaagcgattctcctgcctcagcctcccgagtagctgggattccaggcgcatgcgccgccacgtccagctaatttttgtatttttagtagagacagggtttcaccatgttggccaggatggtcttgatctgttgacctcgtgatccacccgcctcagcctcccaaagtgctgggattacaggcatgagccagcacgcccggcctgaaacctcccttttaaaccacaatttgggaaagcaatttggtcccatctagaaaactgtttatggtttgaaaatgcacgtacccagaatcctggccacattttactctttctgagaaagccattcccttcgtgagtgagaaggcgagagagagatttagagagactttgggcttcactctagcatgtgggtcattaatcagggaaattccgagtaggttataaatctgtgcttttcctctcccccagcagctccattcctagaagtttcaccagagcaaagtctcccacgtttgggcgaaggagagaagtacatgtagcaagcaccagctctgtgctgtttcagggttgtttgtaacagcagaaaatcctggggccatcgacaggagaagagatgagtggatcctgctgtgttcccctagtcggatactctgtagccatttaagtggatgactgagtgccatgtgcacccgcacggatacgcgtcaaggcagtgatgatgtttgaggatgacacgtctcaataccgcgcagctagtctcaccacccagtcactctctgtctcagtcgactcaggctgggtctcagtctgtttgtgctaacaaaataccacaaactgggtaatttatgaagaacagggatttatttctcacagttctagaggctggaagtcccagatcgaggtgccagtggctcagtccctggtgggggctctcctcctggcttgcggacggcctccttctccctgtgtcctcacatggtgggagagacttagtgtctggagaactcactttcccttctcatagagacatgaaacctgtcatgggccctaccctggtggcctcatttaaatctaatcattggccaggcacggtggctcatgcctataatcccagcactttgggaggccgaggcgggtggatctcctgatgtcagcagttcaagagtggcctggttaacgtggggaaaccctgtctctactaaaaatacaaaaattagccaggcatgacgatgggcgcctgtaatcccagctactcaggaggataaggcaggagtatcacttgaacccaggaggcagaggttgcagtgagccgagatcgcgccattgcactccagcctgggtgacagagcaagactctataaaaaaaaaaagaagaagaagaagaaggaggaggaggaggaggaggaggaggaaggggaggaggaggaggaggaaaatctaatcgccttccaaaggccctgcttccaagcaccatcacactggggctttgggcttcaacgtatgattttggggggtaaacaaatgcaatccatagcactgtctatgttcctcattgtatgaagaactgaaattgtttcctgacagctttgcaattcctgacagttttgagctttatccaccaaaatctacctggcaaggagagctaggtgcatgccattctccctagaatcgaacactgatcagttctggttttgccttgcaaggaagaaacattccttacagcacagagagtgcaggtggggatgggaaacatgttttgttcttttcctgagctcatgttgtgttccttgtatgctgggacattttcaaacccacgcatgctcacctctggagcctggacattgcccagccctgagcctctctcagcagccccttcctggctcccacacaagctgcagtttccatggcaacaggcagagctggcctttgtccttggagcctcccggtgagaggtctttagggaaaacaggctggagcaatggacaacaaaattaaacagcatggggccccgaggcgtgttctttcctataattaaactgcacccttggacatttgtagaatgccataaattggctgtaccctgctcagcattccaagtcccctgcaagcatcataatcaaccattatctgctttcatcatttgtttcttcatttgtctatgcattaaccattgattttaccccaacagtagtagcagacacgcttctagaaaatggagatcttgcagaggtttctaaccagggaccattttgcttacaaagaggcattcggaaatactttcagtcggcacagctggaaggggtgggttctattagccttgagtgggtagaggccagaggtgctgctaaacatcccatagtgtacagaacagccaacccctgccgaccccgacacacaaggaggaatgttctggccccacaagtcaggagtgccctggccgagaaaccctgggatacagtgatttgcaagaacccacaatgaaaacccttgaggcacgtacgctctagggaaggagacagctcatgaaatataatgcatgtgccataatgaagaatcagagatagtaggagagagagcaacgggggcgaaggagatggagcagccagggctgtcttctcccaggctgtgataagtgaagagagacgagtaaggggaggaagcagtcctggggaaagaacactggggagtgggcacagcaggtgccaaggccctggggcagaaacacacggagtgcattctgggaaggatgaggagaccaagatggctgaagtcctgttagggagagtcaaggagagaaggaagggatgttggatcaagaaggtccttgtaggtggtaaggacttgggatttataatttagctgttaaaattaggaattatgagcatcatcaatattaactgagcatttactccatgccgggctttctgtagagcactgagattcctagggcctggaagccggcttagctaatgggagagagtggaggaggtcaaacagacagtcacgtagagataaacttcaaagagaacaaatactttgtccagggacactctgggctgtgtggccactagggcaggggtggacatgagaggaggctgcgattagggcactagccagggagagaggcagcatggatgtgttttggatggtggaactgttaactgagacaaaggatttttgtatttttagaatcagcagtttcaaatttaggatggggccagggttgccaatagatacaccatcaacattatcattacaatcattacttatttttattttattttatttatttatttattagaggcagggtctttctctgtcacccaggctggagtgcagggctgtgatcatagctcactgcagcctcaaactcatgggctcaagccatcctcccacctcatcacgactatgataatgaagtaattaatatgtattatacttgttctgcacgtagctttctactggatgcccgtggcacggcatatctgcagggcaggcgtgatcaccttcccacattcctgatgaggcctctgaggcacagagaggaaaggggtggcctcctctcattctgtctgactgtggaatcagactagcctggacagaatccatcacaccacggccacctaatcctctgagccacagcttcctcatttgtaaaaaaaaaaaaagaagaagacctcgctcccagggtcggcatgagaattaaatgaacaagggaataatggccacacagcaagctcaataaacaacagcacaaaacactcagtcatcaagataaacaatattttcatgcagtatttgaaaaaaaaattcatgtacaaaaaaacgtgataaacaaaatattaaaaatttaaataaagacaggaccctatgagactgtgctgagctacatcagaccctcaggcaaaaggaaaagtgcgtatgaccctaagcatgttgctactgtttttttttttttctttgagacgaagtctctgttgccaggctagagtgcggtggcacaatctcagctcactgcaacctgcaactccctggttcaagcgattctcctgcctcagcctcccggttatgtattttttaatggttattttccagaaatagattttgaaaatattattgatgagtctgcttccactgaggccgggaaaataaaattataataaattctatttttaacacataaaattaacataagacattgcgagtttaatatagctatttttccttttttcaacatttttaaaactaatattctgtgggggtggggagtgaaccattaaataattacaagctgcgtgagagagctcacacctgtaataccagcatgttggaaggctgaggcgggtggattacttgagaccaggagttcaagaccagactaggcaagatagaaagactctatctctacagaaaatttttaaaaagtcagaaatggtgttgcatatctctagtcccagctactttggaagctgaaatgggaggcttgcttgaggccaggaggtcgaggctgaagcaatcttcaagaacaaatatttgctcagggacttctctgggctgtgtggccactaggtcaagagtgggctgtggacatgataggaggctacgattagggtaatagccaaggacagaggcaggaatggatgaattttggatggtaatactattcaccgagtcaccactgcactccagcttgggcaacagagcgaaacccagtctctaccaaaaaaaaaaaaaaaaaaaattgcacaatcacacggatatagggaatcacacttttttttttggcctcgggcttcagtacagctcagcacacattgggtttgatttaaattttgagtatttgttcatccattatggggggttgctttctgcgttcattttggttttcaaaaccattgtgttaaatattatttatcttaaataaaattaaccatactcaccatgtggtataatccccggaacgtattcctccttcatgactgaaattttgtgtctttggaccaacatctcccgtccctgaacccctcagctttctggatgactgtgcacctccgtaagcctcttcctaatccccaggtctgcctttgaggatatgacctttgagctgaaacgtgaaaattgggaaagaaacagccatggggactgtggggaaaggaaattccaattagaggaaaggcaagagtgaaggtcttggggcaggaagctttttcagggacagtgaggacagcatggccagggggtggtgggtaaggaaagcagcagacaagagccaggttgccaccgaccttgtgggccaaccacgggtagctttccttttaatccaagtgttctagagccaccgatctaggctcagttggcatggaaggtgggtgagagaatgacattatctgactcatttgcagaaggtctgcagcttgatttttttggaggatagacttatcatggggacaggagtgaccctcatcatcaagatgtgatagttatctagggagaggtgttggtacctggacgaaggtgaacagaagtggattgaatctcattacgtcatgagagtgagaagcacagaggatgacagaggatgatgtctacgtttcgagtttgggctcttgcagactgggtagtgccttttatagagactggggagacttgggggtgaggagtagaattttgagggggactgacaattttgatgtgaacgcgttggctgaagatgccaatttgacatccatgaagaggacctgtcccgaagcctcacattgctaaaccccagaaaatatcagttttgccagcccaatagataacatcaggggattctattttttgcatgttttctcctcaagagtccaaggataacccactgagtccgctcctgatctgaacctctaaggtattgccaggcctggtgtcctaaacatcagcccatgaggaaatcagccctgggccctgtaccaccaacacaacatcatgtcctgtatccccaaaacatgcaaaagtctcatgaacatgcacatcctctgtgcttccctcccctgaaccaccctcatcctcctttctaggtccttactgccacgcacgcgtgcagtctcatgaaaaaggggaatactgtgaccgcccctgtttccaaacggatattgggcctcttttcaagcgtacgttttcagtttacactttcagagtttgttgatttgtgagttcaaggccctctctgccctgcggagagcacggaaattcctggaactgggggcgtgtgtgaaggggacgttgtcaacgctaggacagagaagaaagccgctcattttgatgtgtcagagcggtggggggtggggcttccagcccctggcatctcagccctatccttccttcctgcactgtgcttctcacaaacagcaggggcttgtgttactttgagtcgatagcctcattcacgacactctcacagaatagtgcccgtctgtgctcagcacatgcccgtaaaacaggattccccaaacacgtccataggtaactgtaaatcatttagaagaatctaaagtgtgaattttgtaaactgaagctacgtgcatgtatacacgtgtgtgtttgtgtatatcatatatacacattaatgttattattattatttgcaatacccagcatcgcataataggtgggataatgcagatgccactccaagccaaatctcctggccccaccggtcataagcttacctctgtagggaagaaaaggtttctttttggcagtggtttgttgtttgtttgtttgttttgagacagggtcttattctgcggcactggttggaatgcagtggtgcggtcactgaagcctcgacctcctgggctcaagtgatcctcccacctcagcctcccaagtagctggggctacagatacgcaccacaacgcccagttaatttttgtattttttgtacagatggggttttgccatattgcctaggctgatctgtaactcctgagctcaagcgatctgcctacctcagcctcccaaagtgctgggattgcaggcatgggccagtgtgcctggcctctttttcctcaccaattgctaggttcatgactgaggcccctgtaacacaagacagatcaaccaaaaaaaaaaatcatacagatttatttagtataagttttatgtgacacgggagccttccacaaggaaataaagacccaaagaaacagaaaaacgtgtatatttgatgctggtctgatgaagaagtggatggctgtggagaagtatttgacagaggcagtgtgctctcatgctacaagagtgagagagtgaggggagcttttcaaggcctgtttgttcagattcagtgtcttcagagataaggatgctcctctcctacgggtacagagagggcacgctggaatgacagtcttacaattgcttcagagagaaggacgaggaaagctgagacaggcatttctgctcatgctgttttctcaaatgccaacgtgccatatttcagggtaccatgtcccgagccccaccatctcctaggtaggaattcaggattttggtgtttgtcctactagtaatgggaacccaacaggaagggaattccaagtgtgagaattccagccaaagcccagggtattccagggacccctcagtaagctgttgcaacactcggagccaggagatgctggtggccggtagggggtggtggccaggaccttagatggatgggccaccctcaggggaggttctgtggtacagggtggtggccaggacctcagatggatgggccaccctcgggggaggttctgtggtacggggtggtggccaggacctcagatggatgggtcaccctcaggggaggttctgtggtacggggtggtggccaggacctcagatggatgggccaccctcgggggaggttctgtggtacggggtggtgcccaggacctccgatggatgggccaccctcaggggaggttctgtggtacagggtggtggccaggacctcacatggatgggccaccctcaggggcggttctgtaggccacctcgcgggactccatgacagacgttaagcatggagcctggagaggaggaccccaggtggaggccctggtcccgcctttacgaatgggtagaaagggcttccgtctactgagacaggggtcttgctcaatctcactcacatggatgctccaggaagaaggagcccactcttcccacaaagaaaagaaagatggctgggggtgatggctcacgcctgtaatcccagcacttagggaggccgaggcgggaggatcacctgaggtcaggagtttgagaccagtctgggcaacatggtgaaaccccatctctactaaaaatacaaaaattagccaggcatggtggcgggggcctgtaattctcctgtctcagcctctcaagtagctgggattacacgtgcccaccaccacagcctggctaatttttgtctttttagtagagacagggtttcaccaggttggccaggctgctctcaaactcctgacctcaggtgattcacccgactcggcctccaaaagtgctgggattacgggtgtgagccaccgtgcctggcctaaaatacattttatagcctataagagtgtctcatttcaagcacagaccacaggcctggtatacagtaggtgcttactacagccttgtcgatctgaattctatcagctcttctcaacagttctataaatcaagaacaatgggtgttcaggactctaaacttccatacaaattctctggacatccccttccagcaaggtgctgttcccacccctccagaaaaacattctgtagctcctactgattatgggccatgagaaggagtgggagttttattctgagaaaatagtaagaactgattgcagagttaggcacgggaggcggatgctccgattttcctttgaaaaggatcagggcctttcgaaaagcaattgcggactttcaagggcagacgatctctggtcacggggttgtttgtgcagcggggccttcaggacgagatggatgggacgtgtgggctgcggggcaaggccgagccaggctgacgtcgcggaaagcagagaactgatgaatggaggctggctgtcttccttgagaccgggatcgtattttcaagtgtttgggtggcagaggcgttttagagggagagagagccaagaataaccagtccatgggcagagaaaaaggcaattcctgaaagggagggataacaagctcacacacacagagctgggagtggtgcccagacgcctctcccattcctggacccttagttgtcttttatttatttatctatttatttatttttttgagacagggtcttgctctgttgctcaggctggagtacagtggtgcagtcacagctcactgtagcctctgccgcccaggctcaagcgatcctcccacctcagcctactgagtagctgggaccacggacacatgctgccacacccagttaacttttttgcattttgtcggtagacacatggtctcaccatgttacccagactggtctcaaactcctggactcaaaaatgatcctcctgcctcggcctcacaaagagctggggtacaagtgtgagccacccaccagccctcagttgtcccatccatctcatcctgaaggccccgctgcacaaacaaccctgtgaccagagaacgtctgtccttgaaattccgcagttgcttttcgaaaggccctgatccttttcaaaggaaaatcggagcatccgcctcccgtgcctaactctgcaatcagttcttactattttctcagaataaaactcccactccttctcatggcccataatcagtaggagctacagaatgcttttctggaggggcttggaacagcagccttgctggaaagggacgtccggagaatttgcattagcgcttagagtcctgaacacccgttgttcttgctgtatagaaacgttgagaagagctgatagaattcagatcgacaaggctgtagtaagcacctactgtataccaggtgggaatgtaaaatgatgcaattactgtggaaaacactttgcagttcctaaaaaattaagtggagaatttccatatgacccagcaaccctgcctctgcatagagaccccaaacagttggaagcaaggactcgactcagactgatatgtgtacacccatatccacaacagcatcatttacaagagccaaaaggtgggagcagcccaaatgtccatccatggatgaagagaaacaaaatgtggtttgtacacagcagaatgtacaagctgagcatccctcatcggaaaatctaaaatccgtaatgctccaaagtctgaaaactttttgagtgcagacatgcagctcaacggtcgtgctcaaaggaaatgctcattgaagcattttggattttggattttcagattagggatgctccaccagtaagtataaatgtaaataatctggccagaggccgtggctcacgcctgtaatcccagcactttgggaggccgaggtgggtggatcacttgaggtcaggggttcgagaccagcctggccaacatggagaaaccctgtctctactaaaaatacaaaaattagctgggaatggtggcgcatgcctgtaatcccagctactcaggaggctgaggcaggagaatcacttgaaccagggaggtggtggttgcagtgagccgagatcgcaccactgcactccagcctgggcgacagactgaggccgactccatcccaaaataaataaataaatgtaaataatctgaaacctgaaaaaatctgaaatccaaaacactcctggccctgagcattttaggtaagggatactcaacctgtagttcagctgtaaaaaggaaggaaattctgacacatgctacagcatgggggaaccttgaggacatcatgctaacttaaattacgcagtcacaaaaatacaaagactgtatgatcctagttatatgaggtccctagaggaggcaacttcacagagacagaaagaaggtggcatggtggcagccaggggcttgggggagatgggatggagagttcatgtttgatggatgcagagtttcagttgggaaaacgaaggcgttctggagatggattcactcacccatgtgaatgtatttaaccccacagaactctacactttgaattggttcattttatgttacctatattttaccataatgaaaaaattaaaaataaagatgtacatgaaccactggtgaggtctctgcggggttaatcgtcttcatctccgcttccttgcaggtctgacatcagtagcgcttccatttccactcagcaacatttacctggtttttcatcataaagggcttaggctgttgccatggaaactgcagcaagactgggaaaggggagggggctgcgagggagcaaagagagagcttggagactggaattttccaggctctgagctcacgctgtatgcttcctttgtgataagtcactgagtgaaaatgtgggtctttgtccacaatagcatggtcgctcttcattcctcagtgagactctctcatggaggtgatgaacacacagcagtcagcccagtgccaaatctcctaagagccaggtttctctgtgggtcccctctggattgacacttgcgtatggaccttgggaaagagattctcatttcctcttcttattattttttaacttttattttaggttcaggggtacgtgtgctggtttgttacggaagtatattgtgtgtcgtgggggtttggtgtacagattatttcatcaccaaggtaaagagcatcatacccaacaggtagctttttgatccactccctcctcccatcttccaccgtcaaataggccctggtgtcttttgttcccttctctgtgtccatttgcactcattgtttagccctcacgtataagtgagaacatgtggtatttggttttctgttcctgtgttagttcaataaggataatgacctccagttctatccatgttactgcaaaggacacaatctctttttcatggctgtgtagtattccatagtgtatctatgctacattttctttctccagtccactgttgatgggcatctagattgagtccatgtctttgctattgttgatagtactgtgatgaacatacacgtgcatgtgtctttatgatggaatgatttatattcctttgggtatataccccataatgggattgctgagccaaatggtacttctgttttaagttatttgagaaatctccaaactgttttccacagtggctgaactaatttacattcccaccagcagtgtgtaagtgctcctttttccccccagcctcaccagcatctgttattttttgacttttcaataatagtcattctgactagagtgagaaggtgtgtcattgcggctttgatttgcatctcacaacccctttcagaagtgcttaaagtatatgaacagatattttttcaaaagaagacatgcagatctgggcatggtggctcaggcctgtaatcccagcactctgggaggctaaggcaggctgaggtcaggagttcgagaccagcctggccaacatggtgaaaccccatctctactaaaaatacaaaattagccgggcgtggtggcggacgcctgtaatcctggatactcaggaggctgaggcaggagaatcacttgaacctgggatagggaggttgcagtgaaccgagatcttgccattgcactcaagcctgagcaaaaagagtgaaacttcgtcaaaaaaaaatatatatatatagaagaagaagacacacatatgaccaacaagcacatgaaaaagacatcgttatttaaggcagactctctccaattatttaagtttgaaagtctttacaaaaggagcaaaaccatttctactctcctccttagcatgttgacttctaaaaacaggctttgtgccactgaaacgtgagtcaagtacagttttgggctaattgtttactagctggtttatataacagtaactctaactgtggaccagcaaccacaataacaaaaagcacttgctgggcttaatgactcacacctataatcccagttctttgggaggctgaggcaggcagatcgctggagctccagagtttgagaccagcctgggcaccatggtgaaaccctgtctctacaaaaaaattaaccaggcatggtggcatgcacctgcagtcccagctacttgggaggctgaggtgggaggatggcttgaacccgggagacagaggttgcagtgagctgagattgtgccattgtgctccagtgcaggcaacagagtgagagcgtgtttcaaaaaaacaaaaaggaattatttattcagccagtcacttcatgtatgagttatctattgctgtgtaacaaatcatctgaacttagtggtggaaactacacatattaactgagactctgtgtgtctcatgaggctggagtcaagacctcagctgggcagttcctttcaggggctcagagtcctcctccaagttcaccaggttgttggcagaattcagtcatttaaggctgtaggactgaggtcccacatttttgtcagtagttttttgctgtgtggcctcctcgcaacatggctgttcacttcatcatgtgctgatcattgccttttaaaaaatcatttgtagcttgcacagtggtgcacacctgcagtcccacatacttgggaggatgaggtgggaggagcgcttgagcccaggagctcaaggtttctgtgagctatgatcacacctatgaatagccactgcactgcagcctggccaacatagtgagacctccgtttcaaaatgattacttaaataattaaaaaatcatttgtgactccagctgatttagaaatatgccatctgattcttttcttattgcaataaaatatacataatatccacaattttgaccattttttagtgtacaattcagtggcattaggtacagtcacatcgctgtgcaaccatcaccgccatccatctctagaactgtttcatcttcccaaatggaaattctgtctctgttaaacgctcattcccctttccccctcccccaggtcttggcaaccagctttctactttctctctatgaattcagcaactccaggtacctcgtatcagcagaatcatacgatatttgattttttgtgtgtctggtttatgtcacttggcatagtgtcctcaaggttcctgactgacacaggagcctaatttctggccaatgtccttctccaggggaagatggccgctatcgggtctagagtagacaatggatgaagagaactagaatgacttaagattgatccagatggtgggagatgctcaaagcttttgtgagaacgagaaggaaagcacagggaggaggaatactgtaactgaagctggtgcattctgaaaacaagagtcacaatgtgagcataacaccagccccgccaagtgccctcctgattcatgagtaaaatgcccaacgaagcccaagagctatgaacggaaccatcaatcaaagagacttaatggttttcttggaagcagctcagcatagcgaatgatgttgagacacccatttccaatatattaaaaggtgtcaaatgttcacagtctttttggcagatagtgtctctggaacattctttaacaagctgtctgctaattttaagagcatctgatcttattctcatggtttgaggcatggtggccacggttgggaacggccatcactgtgcctggctcagcaaacaccacctcgggtggtgccgcagctggttctcgcatttcaagtctatgagatcctctctcaccacttgcgtgaaaatagctccctaccccaatcctccacattaatttgggacttaacttttctcaccctctgacagttttttttcctgtttctgtcactagaatgaagcctttcggagggcatgggctcaccggaatcctgtgtgtagcaggatgcctagcacagagtgggaatgctaaatacttgttaaaggagtgaattaatatttggaaggaatgaatgactcttctgattgcctaagtcctggaggagtagagatggtgcccgttttaacttcccttttatcctgcatgcttagaacagcatctgatgcacaactggtgtctgttgactgactcgatgagtgaatgagggaacaagtaatgtctagaccaccggagcctgcagtagagtagtgggtcccggagacgtccacaggacaagtggggccgcttccccgacctcgctcccattccgcaacgctcctttgtatttgaacataaatgaagtaggggcgagggcctgcaggctggagaacctcccctggtcctttcatcccctcctaacccaggctgggttaacgacagcggccccatcttggtccttcctcggggctcttgtttcttagcaacccaggcaaactccatctgttaccatggaaactgcagccgggatgaggaagtggaggtggctgaaaatcagtagacagaacctcagaggatggaatattctggaatcttgtatcagactgagtgtgcacttaaaatttttagcttagaaccgactcgtttctcatttatttttgtgaataaataaaactgtgtgttcttgggcaggtgtttccatctctccgaggcatgagccaccaagcccggcttttttttttttttttttttttttttttttgagatagggtcttgctctgtcacccaggttggagtgcagtggcatgatcagagcttgctgcagcctcagcctcctgggctcaagtgatccttatgcctcagcctcctgagtagctaggactatgggcacacgccaccactcctggctaatttttaaagtttttgttgagatggagtcttgctatgttgctcaggctggtctcaaactcctggcctcaagcaatcttcccgccttggcctccctaagtgctgggttcacaggtgtgagccaccgtgcccagcctacctgggattacaggcatgagccacgatgcccagccgactaattcagtttctgaggaccccaccctcatgatctaatcgtctccaaaggctccacttctaaacaccatcgcacttggggttaagactttgacacatgaattttgggggcacattcagaccatagcaaacccttagctcgggatccgtgcttgatacgtgttaatgattttgaacttcattaagatgaaaataagagaagacgcgatgaaggcagctgtcactggtctcggtgttcactgtcctgggatctgcccagccgaggggcttcattactcatcggagagaaaagtgagtgggggactcccactccttggggctcagttctttattctttcaataaatgcttcatacaggtctactgtgtcagaggtcatggttaagaaccaactccaaagactggaaaattccagtttccggggccctcccggccccttcctcagctccccccacctttccgccctccagctgcagtttccatggtgatagtctgagcctccctctgttgctaagggcagataaacggtcaggagagggagcaggtcacataggttgattaatctccctgagagatggtggtgggcatgggaggggaggggaaggaaagagggaaagagacccaaggggctcaagtctgcaaacccccatctatcattcatgcacagcctttgcgtgcctttgaataggggtttgcagaagaagagaaatgtgcctgtggagagaatattttaaatgtattctctgaaccaggcggggtgggtcacgcctgtaatcccagcactttgggaggacgaggcaggtgggtcacctgagatcaggagttcgagaacagcctggccaacatggtgaaaccccatctctactaaaaatacaaaaattagccgggggcggttgtgggcacctgtaatctcagctactagggaggctgaggcaggagaattgcttgaactgggaagcggaggttgcggtgagccaagatcgccccactgcactccagcctgggcaacagagtgagaccctgcctcaaaaaataaataagtaataaataaaatatataaaataaaataaataaaaaataaaatctattctgttagcaatttgaaaacacacaatacattgtgtgaggtgatagctgtgttaattagcttgagttcatcattccacaatgcacacgtatattaaaacatcacatcgtactccataaatatgtacaataagtatttacctattaaaaataattttttgaaaagatctcacatacatacaaacaaaaaaaaaacccatgcatgtgagggtctctgcagagtcagttagaaatcacgtatctcctgcatcttctggcaataacagcattatctatcatcagaattcaagttatctgataaacattgactgagactttctgcaggtcaagcccttgtccgtgggcagaaaataaatgtccggcaaatggggccgagcctgccttcctgcgctctgtttgtgtgggaggtggatccattcattccaaaagttagatcatttatttttaaaagatgttgattttcttctaggaggcaggtatcatgctagacattggggaaacagcaaggagtaagacaggccttgcaagggctgccttgcagcaaaggagacagaaaatgaactcacatatttcacgtattataccatcagaaagtccattaggcctatgaagaaaaatacagcagggaatccaaagatattaacacggcaggactgctttagatgcaggatgctaaggaagtggtgatggctgagcagaaagttgagtgagggagagagtcacattctcaggactctctggggtaggaagagggggacagatgggagtgcaaaggccccgaggcaggaagaggtaaagcaggtgcaaggaattccatggcaaggaattctttgcacaagaacttaaaacagaactaccattccacccagcaatcccattgttgggcatatatccaaaggaatacgaattgtcctaccataaagacacacgcgtgtatatgtccatcacagtattgttcacaatagcaaagacgtggagtcaacctaggggcccatcagtggtggactggataaagaaaatatggtacctgtgcaccatggaatactatgcagctataaaaaagaatgaaatcatggccttttgcagcaacgtggatggtgctggaggccattatcccaagcaaattaacaggaacagaaaatcaaacaccacatgttctcacttttaagtgggaactaaacattgggtactcatggacataaagattagaaaaatagacactgtagactactagagggaggagggagggggtaaggattgaaaaactatctattaggtactacgctcagtgcctgagtgacaggttcagtcataccccaactctcagcatcatgcaatatatgcatgtaatagacctgcacatacttgtttttctgatttcaccagtttttttcctcgaggtatcattctatgaaagtgtatctcattcatgtgactatcatcatatccgaatacagaactgttctatagccacatatacaaacaaaaaataaaaacaggccgggtgcggtggctcaaacccgtaaccccagcactttgggaggccgaggtgggtggatcacccgaggtcgggagatcgagaccagcctggccaacatagtgaaactttgtctctactaaaaatataaaaaattagccgggtggggtggcggcgggcgcctgtagtcccagctactcgggaggctgaggcaggagaatggcgtgaacccaggaggtggagcttgcagtgagccgagattgcgccactgcactccagcctgggcaacagagcgagactctgtctcaaaaaatatataataaaataataaataaataaataaataaataaataaataaataaataaaaaggagagagaaaaatggattagtgcccttataaagacagcctagacagaaaatccgtttctctaccatgttaggatgcagtatgaggatgatgatgacctgcaaaccaggaagaggcctcaccagaaacagaccatgctggcatcctgatctcagaattccagcctcccaaactgtgaggagtaaacttctgttgttgataagccatccagtcagtggcattttgttatggcagcagcccaaacagactaagagctttcatggattttctcaattagtcattccaccaaccctatggcgtatgctataattatctccatttaacggatgaggaaactgaggcttggtcgggaggtccaaggtcagacagcttgagaacggcagctcctggagtcagatccaggatggtggcatccgaggcagaggatgagaactggaggtcacggggagagcttctgtggattctggatgggagagaggagcggtgacagtctgtgctgcagggcgagccttgcctgacctcccttggatgcctcaatctgcttctgcctgctgcttgctctctcatttcatcctctataaaataggatgcagcagcaacaccactttttttttctttttttagacagggtcttgctctgtcgctcaggcaggggtgcagtggcacgatctctgctcagctgcaacctccgcttcctgggctcaagtggtcctcctggctcatcctcctgagtagctgggactacaggtgtgcaccaccacaccacaccacaccagcctaatcttttttttttttttttgactcagggtttcacctttgttgcctacgttggtctcaaactcccaggctcaagcatttcgccaaccttggcctcccaaaatgctgggattacaggcatgagctaccacccctggccagtgataccacttctgtacagaagtgtatttcttgcaaaatttacagaagtatatttgttgcaaggtttgcaaaagtgtattacagaagcgtatttgttgcaaagtgtgcagaagtgtattcatcgcgaggggttacaggagtgcatttgtttcctagcactgctgtgatgaagtactacagactggatggtttaaagcaacagaaatgtattctctcatcgttctggaggccagaagtctgaaatcaagttgttggcagggctggttcctcctgaggactttgagggagactcttttcgtttcttgctttttccctagcttttggcggtttgctggcttgtagatacatcatcccaatcccccatctttacagtgtgcctgcgttcacctggctgtcttctcctaaaggcatctgtcctgtgggatcagggacccagcctactacaggaggacctcattgtaactaattgtatcagcagtgaccctgttttcacattctaaggtactagtggtcaggacttcaacatatgtttttgtgggatatgaaatccaacccataacgaggaggtagagtgtgtgccagtgttcatcactgtttgcagcacatataatagtaaactctccatgaaagctctatactaggctcagaagggccctgaggacaccacgattatacacattcatttgtttttattttgtagttctgatgaaggagctggacacccttgccccagcctccagtgccatctgcccagacggaaggatgggaagagtgtagacatgaaagttgagtctcagaaaaggtagaacccaggctgggagtggtggctcactcccctgtaatcccagcactttgggaggccgaggtgggcggatcacctgaggtcaggagttcaagaccagcctggccaacatggtgaaaccccatctctactaaaaacacaaaaattaaacagacatggtggtgggtgcctctagtcccagctacttgggaggctgaggcaggagaatcacttgaactgggaggcggaggttgcagtgagctgagatctcaccactgcactccaggctgggtgacagagcaagactctatctcaaaaaaaggaaaggaaaggaagaaagaaagagaaagagagagagaaagaaagagaaaagaaggaaggaaggaaggaaaagaagaaagaaggaaagaaagaaagaaagagagagaacccaggtgaggcacaggacatgtgtggtgaccaggcttgcccagcagtgtcctaatcccccacccagcctttggcacacagggcctttaacagagggattggaggtatgaagtgggaacaggaccccaaggtggggccgttgtaattggctatgaaaaggcaatgggtggtgacggcgggactggagagaaggggaatgattgagaggttcatggggagagggtggatgcaaaagtggaatcattgagaggttcatgggaagcaggtggacgtagaagagatagaatcgatggtggtattatgggttacagtgtatcccccaaagagaggttggcatcctatcccctggtacctgtgaatgtgacctccgttgaaaataaggtcttggctgggagcagtggctcacgcctgtaatcccagcactttgggaggccgaggcgggcagatcacgaggtcaggagatccagaccatcctggctaacatggtgaaaccccgtctctaccaaaaatacaaaaaaaaaaattagccgggcgtggtggcgggcacctgtagtcccagctactcgggaggctgaggcaggagaatggcaggaacccgggaggtggagcttgcagtgagctgagatcgcgccactgcaccccagcttgagcgacacagcgagactccgtctcaaaaaaaaaaaagaaaaaaaaaaagaaaagaaggtctttacgggaggtagccacattaacatcaagtcagttgggtgggctttcacctgacatgactgatatcctcataagaagaggagaggactcagacacagaaggaagaccatgttagatggaggcagagattggagcgatgtggccacatgccgaggggcactgggaactgccaggtgctagaagatgccagaaaggactctcccttcaagccctcgcaggcagcatagactcgcaacgccttggtttcacagcttgagcttccaggactgtgagagaacaaatgtccattgttttaaggtgcctggtctgtgatgctttgtcatgagagctgcggaaaacgcatgtgggtgggtgtccaggagaaggagtgtaggattctcccaggggacgaagtggtcagagaacaggttacactaggtggcaaagggaattaaggatacaggtgggagtaaggttgctaatcaatagaccttaatatcgggagatgatcctggattatccaggtggaaccattgtcatcacaaaagtttgtttaaaaggcgttaaagaagccagagggatggatgtgagaaggactcagccaaccacgctggccttgaagagggaagctggagccctgagccagggaatgtgagtggggtggtccccacaagctggaaaaggaaaggaggcggattctccccccacaccagagactccagaaggaacgcagctctatggacaccttgatttcatcccagtgagacctgggcgggatttctgacctccaggactgtaggatagtgaaggggtattgtttttagtgtccgagtctgtggcgatttgttccagctgtgacaggaagcccacggcggcgtaagcaatgctgcgtggtttccaagactgggtcagaaatggggtaaaaccacgtccagactgtcctgggaacgttcctttgcagctggggtaagacgtccagctgggcagaagtggccacgcaggaaaggctgtttgggaggaccacccagaggtagagatgctgggtgtccagccatcccagtgcccagtgcccacctcctcccaggtcgggcatgacacgtgggcgcagacgccttcaaaaggactcagccctgagcgtcatcactgaccgcagccactggagagggcatgagcgagaacagaggtagctgagcccagtcacaaccaagaaacagagagagaatagcagatggtgactgttgccttaagccagggtgcgagctgagggctggctgctttttgcaatttaaatttttatttaattttaattttaattgtttttttttttcagacagagttttgctcttgtgtcccaggctagagtgcaatggcacaatctcggctcactgcagcctctgcctcccaggttcaagagagtctcctgccgcagcctcccgagtagctgggattacaggtgcaccccaatatgcttggctaatttttgtatttgtagtagagatggggtttcaccatgttggtcaggctggtctcgaactcctgacctcaggtgatccgcccgtctcggcttccaaaagtgctgggattataggcgtgagccactgcacccagcctaaaattttatttttaattgacaaattgaaaccgaagggttaatctgaccaggtctgccagctccgcttgctttcaggcatttgttttctgttattttttgttcctctttccacaaagctgaaggccatagtagctgaaggccgcaccgctgactgctcagatttaaccttcactggctattggatagataacattcattggtcaccatggtaatggttgcttctgttgttcaggaacctgggaaatctcccatcaagttcaaaccggttgagaccaccagccctccaagtgggcccctgcaaatgcctaagagatggctgggttttttttgttgttgtttttgttttttttttatttttatttcagtagcttttgaggtacaagtggttttttgttacatgcatcaattatatagtggtgaattctgagattttagtgcacctgtcactcaagtcatgtacattgtacctaatatgtagttttttattcctagtaccactcccaccctcttcctcctgagtttcttttctttctttctttcttttttctttctttcttctttctttctttttctttctttcttttcttttctttctttctttctttccttctttctttcctttctttctttctttcttttcttttctttctttttttactgagacagagtctcgctccgtggcccaggctggagtgcagtggcgcaatctcggctcactgcaacttctgcctcccaggttcaagcgattctcctgcctcagcctccagagtagccaggattacaggcacacgccacacgcacggctcattttgtatttttatttttagtagagacggggtttcatcatgttggccaggctggtctcgaactcctgacctcaggtgatccacccaccttggcctcccaaagtgctggggttacaggcgtgagccaccgcgcccggcctcctgagtctctaaagcccattccatcactctatatgcctttgcagactcctagcttagctcccacttacaagagacagtgtgcactttttggttttccatgatgtggggaaagggagtgtgaatacactgctggagagatggccttttgacctaagcggccaaaaactccaccctcagatcatgccagcactgccatttccagtacacgtgtcctataaaatgccatgaagcccgacgatgcttgtgcagtacgcaccagtcacttcattttcgccactgtcaatcacctttccgcaagcctcaggccaatccactcccccaacccatacatctcccaaagactcaccttcagggatgcagatctgagagatgttctcccacctccttccttggtgctcttgcaaataaatcttttctcttttgcaaagcctgtgtcagtgattgatttactgtgtgtgcacagagtggacctggacctgactggtaacagaatgaaacgtgtgtgtgtgtgtgtgtgtgtgtgtgtgtatgtgtggtacaatatgatgttctgatctaggtatacatttggaatggttatatcaagctaattatccatcacctcacctacttaccatttttgtgatgagaacatttaaaatctactcttagcaattttaaaatattcagtacaggccgggtgcggtggctcacgcctgtaatcccagtactttgggaggctgaggtgggcggatcacctgagttcaggagttcaagactagtctggccaatatagtgaaaccctgtctctactaaaaatacaaaaattagccaggcatcgtggcggacacctgtaatcccagctacttgggaggatgaggtatgagaattgcttgaacccaggaggcggaggctgcagtgagccaagatcgtgccactgcactccagcctgggtgacagatcaagactccgtctcaattaaaaaaaaaagaaagaaaaagagatagaaaaaaaaaggttgatcaaagggtacaaagtttcactcagacaggagaagtaagttttagtgatctatcatacagcatagcagctgtagtgaataataacacatcgtgtatttcaaaactagaatagtagattttaaatgttttcgccacaaaaaatgataagtaggtgaagtaatggatacgttaattagcttgatttaatcattccacaatgtatacatatatcaaaacatcacgttgtacccaataaatacatacaattattacacgtcaatttaaacatttaaaaaatctaatctaaaatgctgtggaatatttttccctaacagtaataatcaattggtattactcaaatgtctatattaactatctcgttcatttgttgtttttccgttttttttttttgttgttgttgttgctgtttttgaggccatggatttttttttttttttttttttgagattcgagtctcgctctgtcgcccaggctggagtgcagtggtgcaatctcgcctcactgcaagctccgcctcccgggttcacgccattctcctgcctcagcctcccgagtagctgggaccccaggcgtccgccaccacgcccggctaatttttttttgtatttttagtagagacggggtttcaccgtgttagccaggatggtctcgatctcctgacctcgtgatcctcccgtctcggcctccccaggtgctgggattacaggcgtgagccaccacatccggccgaggccatggatttttaagatgcgtattattcgaggcaccatgataaaagaaaaatgctgtttactaaattatgacaaacgttttaaaatctaaaaaatatgtcagaataaatgagatccattattctcttcctcaaacacctgttgcttctttctttgttccttgtctagaaccttattctgtggtgttggtaacgtctttatttggaaaatccatcccggactcagtgcagggcctgcgggttagcaggaactcacagatcccggactcactgcgtggcctgcggtttagcaggaactcatagataactgccgaatgtgcaaatgcacaagggatgcatttcacttctgaaaaatgtggatcactatgtttacaatgtctggcctcctacctcttttagaaaattttaaaacttaaaaatttaaattaggggccaagcgcggtggctcatgcctgtcatctcagcactttgggaggccaaggcagatggatcacctgaggtcaggagatcaagaccaatctggccagcatggcaaaaccccgtctctactaaaaatacaaaaattagccgggcatggtggcaggcgcctgtaatcccagatactcgggaggctgaggcaggataatcacttgaacccggaaggcagaggttgcagtgaaccgagattgcaccgccgcactccagcctgggtgacagagtgagactgtcacacacaaaaaaaaaaaaaagaaaaaagaaaacaatttaaattaaaaattatattataagcatatcacagaacatcagctggcctggtacttagcaagcatttaagaaacacttgccactattattaatactgttcttgccactttttaaagtcaccagattgagcaaataaaaattcaggctgcccagtaaaattcgaatttcagataaacaacaaatactttttgtgagattgcatagtttactgcccattgccaacatggatgcatagagttgatgcttaaaggtatgcaaaatttttatactaccaatatttacataagtattttgtcaaaagaaacaacaaattcttcaattaatttctgaagagtctacttacacaggcacgaaaacttattttaaatgtcttcagagtataggaatacaacaatttaagaataattttaccacaagagaaggtataaatagatcaaacaattttcttgcacagggtaataacattttaacaatacacaacatttttaaaacaaagattgtcttaagtggcaacccaattatgataattagagagataaatctgtaacaaatatcataaataatttttgaacacagagtgctgattctctttttatcatggttttttttttttacataaaagaaatttctttatattttcccaccattgacaatttatatacttgggaatgagcctgtttaaaaaaacaaaaataaagagtatttgccatgaatcaaatccgagtaacctggaaaaaaatctgaaaacttgtaatcaatatatttttacttttatgattttagactgtggtaaaaaccttatgcattctgcaataggcatcttgcccattactacaagaaatgatccttacatttggataaacacaaaatacccctcgtaatcagttcaaatacagtctaatactatatattatgaaaagtaggaagtatggtaagcaaagctagtacagttctttttcaaacctcaggcaagctgaacaaaagcttttaacctcagagtaatgaaggacaggcatcagtttcataaaatgatagatggctgtgacaagcaaagatttgtgcagtttttttgtttcatttaagaatgtagtgcaatattaaagtttaaagtttgttcaaaatgacagatcatctggaaactaaattgtagcaattgacatcttttagctggaaacacttaggaaaaatcaggtttgcttgtttttagttgaaaatgtcaagatttacagccatggagacattggatgaatctggaggtcagtgtgccctcaggatgtgtctttatgagcaattgttcaagattaaaagaaaatttatgctagaaaattgtgtttttctcggactaaaaatactacatcaggatgggcacagtggctcacgcctgtaatcctagcactttgggaggccaaggcgggcaggtcactttaggtcaggagttcgagaccagcctgaccaacacgttgaaaccccgtctctactaaaaatacaaaaatgagccgggtgtggtagtgcgtgcctgtaatcccatctactggggagtttgaggcaggagaattgcttgaacccagaaggtggaggttgtggtgaactgagatcatgcctctgcacttcaacctggatgacagcgagactccatgtcaaaaaaacaaaaaaacaaaaaaataccacctcagtttataagcttcctgtacaagttggaagaccctgctgggctgtatccctcccctgccccatctgctcctctccctgtctgcattgttcctttgcatcgcattgaagatctcaggccctcccgtaggatggagcaggaaagattcaggctagacatgtccccatcaacccccacccctacccactgaaccctggaactatgagcagaaaccacaccgctccttccccaacagaggtttcctgctgctatgtggccaaaagagagtggggaggaattctcaggacacccagaggtggtacagtccaacctgaccacagggagggaaccccggcccacacctgccctgcccaggtgagtgtgtagaggggcgtgagaaggaggtggtccaagtcctccctgattcaagaaagctctgaatttcccctgcaatgagcttagtagaattcagagacctacctgtgacaacagagactcagagtgctctgagaagctcttcattcattcattcattcatgccattgatatttaccttgctaggcactgggaatacgtgggtaaagacacgtattcctgccctcatggggcttctattccagcagatgagaagccgaccagaacaaaaatcaatcagagtcattgctaatagcagtcactcactacacaccatttgacatgtaaagcaagctgacatgatagtggttgtgggagaggtggggagaatttctctaagaaggtgacatttcagcaaacctttgactatcaagaatgacctatcaggaagaatccaggcctgggaaaatccagagagagcgagacaggggagggaaacggcaaactgccaaggttcagaggtgggaacgagcgtgcacatccaaaggactgggcgaaggctggtgcctctggggagcagggttacgtggggagggtcggggactggagctggagcgattgtttggagcccggtaggcgctatgtgtgtttactgactgtactagagatttttttttttttttgagatggagtttctctcttgttgccccagctggagtgcagtggcatgatctcggctcactgcaacctctgcctcccaggttcaagggattctcctgcctcagcctcccgagtagctgggattacaggcatgcaccaccacgcccggctcattttgtatttttttagtagagataggggtttctccatgttggtcaggctggtctcgaactcccgacctcaggtgatccaccaacctcaagtgatctgctggcctcggcctcccaagtgctgggattacaggcatgagccactgcacccagcccttttttttttctttaatcaagatctctgtcccacaagactcccatgggaacatgggctgtatgaattttccaggggctgacatagcaaagcactgcatgctgagaggcttcaacagcacggatttgttttctcagagttctggaggctggaagttcaaggtcaaggtgtagcagtgttggtttcccctgaggcctccttggctcgtgcacggggtcgtccctctgtgtgtgtctgtgtcctaatctcctcttcttataaggacacacacccgttgaaagagggcccacacttaaatcctcattttaaggtaatcacctctttaaaaatccagccccaaatacaatctcatcctgagatactgagggtcagggcttcaacatatggatttcttttgagggagtaggacacgattcagcccataacaaggacagagctggcttgcgtttgacgatcattgcgttctgcgtaccttgaaccgttcctggcagaaggcaaggactccagcaatacatggagtgggcgggtggagagagcagataatactgatttcagtaccactcagagggcactgtgaccgccaaccgtttgcagaggcgtgcgcaactgtagttctgcagaccttggctcaggacgtgctttagtgtgcccggaagaggcacctgtgtccccggctgaggcacagcaggcctggcctctcaatcctcctctgccatccgtccaccctgtcctcccctagggagcacctacctggtgggaccactgaggcgggctcgggctgtcaccagggaaaccgcagcagggtgcggaaggcgagggggttgaggaatgaaaagaggaagtccccaaaaccagacttggagggtggggactcaaaacttcagcttggcacaagtaggtacttaataaacgtttgttgaaaaaagcaataagtacctttcaaagcattacctgtcccaagtgtgtctggactgaaacaagaacgtcttttgttgcaaagcaaaatgctctgtgaccagctcgtacggatgccaggagaatggggatcttgtttgttctctgccaatagaaatgtattagtgaaagtaagactttaaaacctcagcactaagtggtttcggcattgactgagtgcccagccgctgtttgagccacgtggatgtgctcgttttattcttagagttactgtgtgtgcattctgggaggccagcggggaagtttccagaaattgtaagaaggtaatggcgaaatggatggcttaggaacacaggcaacacctcggctgagtttgaggccacggtccgtggctccggagctcggcgtccagccaggatgctggactgcagaatatgccaaccttcttctagacccatttccagtgttttaaatgctgatagtacacgctacctcctattccctacatgtcctaggtgggtgttcataggcacataccataaaataaaaaataaatatcatgaaattaaaaatcatacaacaaatcataaactaaaaataacattaataataataagacccacgtgcaaagaggggggaaagccttcccgcagggtccttgcgcattgcttcctcccacgtgaccccagacgagccgcctcacttctctgagtctctttccacttctgatgcagacaatgacgccacgcgtcccaccccacagggcggctggaaaaaggaaatgaatccgtgcgtgtggaaacgcttgggatagtggcaacacatgctccttatgacatcgtgtcagagaggtgtttgcacatcaagcttacccaaatcttcactcctgttttcagcagagctgcccaaacctcaagacggtccttccttcccctcctcctcttgcagcccctgcattccatccctgactcttccgcgagctgcagcaggaaggattcaggccatacacatgaaggagcaaggctacccctggggccaaggccacccctcgcccacccccgtctctcccaccccgggtagccgtcactgccgcagagcagggggaacgtgtcccaggtcactgcaccctctgctgtgtagggactggggtcatttctgaccgaacatcttactctagggcctgagattcagtgtcgtgggggactgagtctgaatccttcccgggcagggctcaccagcagaattcagatggaaactgtagagtgctgtcagcaggggtgtgctggagccagcttctactggaggacaggaaccaacgcgtcaactcgcaggaagtttgtgagatgtttaagcacatcgtttagtaaacaggacactccatgcactttcaaaattaaataaatgacgtaagccgggcacggtggctcacgcctgtaatcccagcactttgggaggctgaggtgggcggatcacctgaggtcgggagttcgagaccagcctgaccaaaatggagaaacccccgtctctactaaaaaatacaaaaattagctgggcgtggtggcgcatgtttgtaatcccagctactcgggaggctgaggtaggaagatcgcttgaacctgggaggcggaggttgcggtgagccgagattgcaccattgcactccagcctgggcaacaagagcgaaactccgtctcaaaaaaaaaaaaaaaaaaaaaaaagacgtaaagaacaaaggtaggaaacaccctaaacatacgctttcctagttatttaaatacattttactagcgtctgtgtttgggggtgattgacatccattgtgtctgcagtagatgtgggggctgctgacctcctcccacctccatgcccagcgagcaggccggctcctgcagctgcccatgctggggaggcatttgcaccatggaagctggcaaacaccaccgggcacgccaccccggcctccagagttggctgtccagcattcaccagctccccactggctgcaggaatccaattctttactctttcgggtgtaagtgcttatttaggaagccctccggtaggctggtctgtgctccacgcatcggggtacaacggtgagcagaactgcaaagagcctgtctttctgcatcttccattttgtgagaatgaaaagaaaataaacataaaactcaacccaggaagaagataatttcagaagattctaagtgcaagaaagaaacagagtgaggtgatactaacgggcaaatgttactttcttttttttattattatactttaagttctagggtacatgtgcacaacgtgcaggtttgttacatatatatacatgtgccatgttggtgtgctgcacccattaactcgtcatttacattaggtatatctcctaatgctatccctccccccctccccccacaacaggccccagggtgtgatgttccccttcctgtgtccaagtgttctcattgttcaattcccacctatgagtgagaacatgcgttgtttggttttttgtccttgcaatagtttgctgagaatgatggtttccagcttcatccacgtccctacaaaggacataaattcatcattttttatagctgcatagtattccatggtgtatatgtgccacattttcttaatccagtctatcattgttggacatttgggttggttccaagtctttgctattgtgaatagtgccacaataaacatacatttgcatgtgtctttatagcagcatgatttataatcctttgggtatatacccagtaatgggatggctgggtcaaatggtatttctagttctggatccctgaggaattgccacactgacttccacaatggttgaactagtttacagtcccaccaacagtgtaaaagtgttcctatttctccacatcctctccagcacctgttgtttcctgactttttaatgatcgccattctaactggtgtgagatggtgtctcattgtggttttgatttgcatttctctgatggccagtgatgatgagcattttttcatgtgtcttttggctgcataaatgtcttcttttgagaagtgtctgttcatatccttcacccactttttgatggggtggtttttttttcttgtaaatttgtttgagttctttgtagattctggatattagccctttgtcaataggaagaatcaataacgtgaaaatggccatactgcgcaaatattactttcaaaaggaggtcaggaagacttcctggaggaggcgaatgcacggtagcactcactcccaaagggtcggaagtacccagtaatgggaagatctggggaagaagttgtgggcaggtgcaaagtcaggaagaagcctgaggtgcccagacaacacagcggcacataatgagtggtggggagagagataggaggggaggctgctaggtgctcagcagaggctgcgttacagatggaccctgaagatgggggtgaggagacttgatggcttgatactgtttgatagcactgacagctattggagggtgatgactcaggaacttccctcaccaataagcgtttcttaaaaaaaattactctgactctacaaatatatatgtatatataatttaaccacattttactagcatctatgtttgggggttactgacatctctctatctatctatttatctatatatttggaggatcagagtaatttttaaaagaagtgtctatatataatgtatgtagaaataatatataaataaatacctatataaagtaattatatatttttatatttttatttatatatttcacttaaaatatacatttttaaatatatatgttttgttttgtttgagagagtcttgctctgtcaccttggctggagtgcagtggcaccatctcggctcactgcaacctccgcctctcaggttcaagagattttcctgcctcagcctaccaagtagctgggattacaggcacctgccaccatgcccagctattttttttttttttttttttttgtattttagtagaggcagggtttcaccatgttggccaggctgttctcgaactcctgacctcaggtgatccacccacctcagcttcccaaagtgctgggattacaggtgtaagccgctgcacccagctgaacccacctttggaacttagtgagtgtctcgccctaagtgcctgtcagctggggcacttcctctgtgccctacaaatgttcctcaaactgaaattctttagaacaatgcaggaagaatcccatgcaatggcataaagcactgtaaactatttcacttttattactccggaaatttatattgctttttattttccgtaacctgaagatatatgtgctagttccttggggctgggacattaagataagttgtgtggtccttccttccaacacagctaccaccctgggctcctcctctgggcacactgtgggcgcctgctgctcgcaaactgtgataaggaaggagctgttttttctaagatcactgggatccattaagggctccgcaggagaaagacagaacttctctttaggatgatgaaagatgagggtgtcacaggtggtgactcaaacaacaattgagaggcaaaggggtctgaacccatctgcaaataaatatcatttgaatgaatgaacgagtgtatccaggggtgaagcgggaacagaagtcatggtgaaccactgacaggaggaccgtggtgggaacccttcctgcgctatgaaggcagagttgaggtgctgtagcctagactgtagggaatcccttttgccacatcaggtgacacccactggttctagatactaagatgtggatatcactgggggaccatcattcagcccaccacagatggatgagtagagaggttaatggatggaaggatggtaggtgaaaggatggatagtagagtagatggatgaatagtaaggtggatgattggatggaagagtgaatggatagatgggtatacagattgatgggtggtgggtggatgattcctgtgatccctgcctcgcttctcagctaagctactctgatgtccatcactctgacctgtcccccgacagacactctcacttggtacagacctcagaagcaggctctggtggtcaccatggaaatgcgattggatgaggaaggtaagttgctgaggagtgggcagagagactctcagatgctggaaatttccagactctggagtgaaattaaggtgtgtaaaagggactataggggaggggcaagagtgagaccacggaggaggatgttgcaatcgtccaggaatcatggtggtggaggtcactaaggttgtgcagcagacactgaaagaaaaagaaaatggctcctgacaaaggagggggaaatagcaggaacagataggaaaggcatttctgactggagaccttatacacactacaaaaccacaaacatacctttaaatactgggcacagtgtctcacacctccaatccctgcactttaggaggccagggaaggaggatcgcttgaagcaggagtttgataccagcctagactacaaagtgagatcccatttctacaaaaataaaaattagctgggctcagccgagtggggtggcacatgcctgtagtcccagctactcaggaggctgaggcgggaggctcgcttgagcctaggagttgggggctgcaatgagctatgattttgccactgcactccagcctgggcaacagagtgaggccctgtctcaaaaatacacacacacacgcacacacacacacacacacacttaaaaaacaaaaggttgaaaatgaaacacatagtgaaataaaagttctgatagtatcttcccaattgctccacctcactttagagtcaggtgagggaggatggtggcggaggctgcaacacagtggctgagacatcgctctcagcgtgtcaccgtgaggtctcccagggagggtgtggagaaaacagtgcccaggacagagcctgagaaacctcaccgggaagatggagcataacaaggaaagcattactcaaccattctgtgtcactgaagtgtgtacacaattagcccatctgttgctcaccctcctcattcaccaacccctattccaagaaatttaaatgcccaaaataggacttcccaccagtgggaggtgttggcagccaacacagaggagcagctccagaatccagggagtttgtttgaaataaaactgacctataacaaagagagacaagtatctcttcaatccctaccatccctccacctacccacccatccatccacccatccatgtatccacacttccatctaatgcacacaactatccaactgtccatccattcagccacccatgcaacaacccacctaatgcattaattctgtcattcttccaattatcaccacccacccatcacttcatacacccatccacccaccacccatccatccacatacccccatccatccatgcttccatccaatcatgcaccctacacctgtccccccacccatcacttcatacacccatccacccaccacccatccatccacatatccccatccatccacccaccacccatccatccacatacccccatccattcacccttccatccaatcatccaccctacacctatccatccacccaccacccatccatccacatacccccatccattcacccttccatccaatcatccaccctacacctatccatccacccatcattccatacatccatctacctacccatcaatctgtatacacatctatccattcacccttccatccaatcatccaccctatacctatccacccacccatcattccatacagccatccacccaccacccatcaatctgtatacacatctatccattcactcttccatacaatcatccaccttactattaatccatctactctactatccatacttccacccaccatccttccatccattaacctatctactcatccatctgtggtgagctgaatgatgaccccccacgtcttagtttccagaatctgtgagtgtcacctgatgtggcaaaagggattccccgcagtctaggttacagcaactcaactctgcctttatagcacaaaagtggtcctagacaaaacacaaatgatggatgtgtctatgttccagcacaactgtattgtacaaaagcaggcaggccatagtttggcaatcagccatcttgttctgaatgatcaggcccctacttcactttccgacaaatctctatccactttttcccttgctctctccaccgtagccacactggcttcctcgatggtcctcaggctgggcagtcatcagcctcatggcttttcaagacatacattcttctgtctggactgtttttcttcttgatattcccataattgttccctccctccattgagattcaaatatcaccacctccaagaaggcatccttgactcccaatctaaaacaccccacccctgctctttgaatctgacttattgttcctgataacactcgccaccacctgaaatcttacctatgttcccatgtatcacccctgctagaatactcatgtcccagcatgtgaatacatctgttgcgttctctgctgcacccaccacgcttggccagggtataccactaagtatgcgcccagtaaataccagctgaaagacaggatggatggatgcgtaaatgagggcatgaacagctgtctgtcctaagagtccccggctccttttttcacattatttcactctccgtgtctaaagcagtgtctggagggatgggggggctcgatgaatatgtctgactgaataaggacgtgaaatgctgctgcttagaagatatttgggatttctgtccacatccacagtggcccctgaagccatttttctacgttttgcggagacgctgctgctgctgacgcatttcgatgtgtgcaaaatacgcacatgaacagccgatacggacacttttgatgtccgtccctctgccctgttccctgctcactcggtgctcccaaccttctagcgaatggtgcaggagctcaggttgttgccatggaaaccccagctggaatgggggaggcaagtgcgtggggaaggtgtcgagagatccgcagaggatggaattttccagactctgcagtaagatgtgagctccacattgaaggcctggaccaatcgtctggcctcacccacatctctactgacctcaggactctctgtgtccgtagcccctttgggtctcctcatactctttggcagtctggagttccgggtctatttctcctgtgagtcctttagaaaggctgtctgctccttgcatctctctcttgctctctcgctctctctcttccctctctctttcctctctcctcttcttcttcttcttcttcctcctcctcctcctcctcctcctcctcctcctcctcctcctcctcctcctcctcttcttcttcttcttcttcttcttcttcttcttcttcttcttcttcttcttcttcttcttcttcttcttcttcttcttcttcttcttctcgatctcagctcactgcaaccttcacctcccaggttcaagcaattctcctgcctcggcctcccgagtagctgggattacaggcgcccaccaccatgcctagctaacttctttgtatttttagtagagatggggtttcaccatattggccaggctgctctcgaactcctgacctcaggtaatccacccaaagtgcaccctcgccctcccaaagtgctgggattacaggtgtgagccactgcgcctggccctcctttcttctttctctctctcttttcctcctctctctcctctctctctctttctgttctcttgcctctctctctctctttcctctcccctcttctttctctctctcttccctcctctctcctctctctctttctcttctcttctctctctctctctcttattcccctctctgctctcactctctctctcacacactccctcgggcaaaataacaaccctggatcactccagttcccactgccccagatcctcatttttgtttcagctcttattgtcagtccagggggtccatgctcaggtttgttaagtgggtatattacataactcttaggtttgaggtataaatggccatcagcactgtacccaataggtggcttttcacctcctgccccctccgtccctctcccctctagaagtccccggtgtttattggtcccatgtttatgtccgtgagtacccaatatttagctcccgctcataagagagaacatgttgtatttggtgttctcttcctgtgttacttcgctgaggacagtgggcagccttgtgcttttagccataatcagcaacttgattggaatgaatttccagctgggtcccttgtcataggagggctcgtggtaccttctgggaaacattcctgcatgcctgtctgttcccatgtctgccaaagttgagtccactccgtgatcttaaaaattatgtattatgtttagtttaataaacagtattatagcacttactctgtaccattcagtcactgaggctcatttgaggtatgttctaatattatctcaattttcgtatgaggaaatggaaggacaggaatggcagtaagttgtgcaccttcacccagctggtcagcagcagatctggggttcaatgtcaggcagcaatcccccatagtctgtgctttaaaaagaccagggctgtgcccttgcttgacacatctctgagggtggcccatgctctgatgtccgttttagagatgaggcagctgaggtaccagcctatgaccttagaaacgagttagtcattctctgactctatttcactcaactattttagtaataacattttcaacagagtcttcaaggagggttagctagttatttgtaaattgcatgctactgcagcaatgtgacacacacacgcgtgcgcataagaaatacatcatttttaaagacaaaatttaaaaaatagaaataattttctcacaatgtcccacttaggaccccattgggccaggcaagagggagtggtggcttaaaacagggtggtgacaatggagattggggaactagggatgatttgaaacatgtgggtgagagctaacctgtgcaaaatgtatcttgggattcttgacctgtgggtgatggactgggtttgctggcaattcgatcagctctgacttgcactgtctgtactggatgctgtcccacgggagcagtggatgggtggatatctgtttctggagctcatgagggagtctgggctggggatggagatttggggacccattgacacagggggtcattggagatcagatcacagtgttgtgcattgcacaactccagggggcaccatccaggggcaccatccacggggcacaactccaggtggcaccatccagggaataccatctgggggcaccatccaggggataccatccagggggcaccatccaggggataccatccaggaggtaccatccaggggacaccatccgggacaccatccagggggcaccatccagggaataccctccaggggataccatccagggggcaccatccaggggataccatccaagggataccatccagggggcaccatccagagggcaccatccaggggataccatccagggggtaccttccaggggataccatccagggggcaccatccagggggcaccatccttgcggatgacgctatgagtaggacctcaccaagattgccctgggagtgcacggggagaaagaggagcattcaggacttgattaactaatcagaaagacgagaattgatgatgaaaatatcactcaacctcccccaggtcttgggagcccaccccttgcatgagtgtgccctggatgtggaacacggagtcaaataagattattttggagctttaagatttagtgactgccctactgggttttggatttgcatggggcctgtggcccctttcttttggccaatgtctcccttttggaatgggaatatttacccaagacttgtacccccattgtatcttagaagtaactaacttgaaggctaataggtggaaggaacttgccttttctcagatgagacttgggactctggccttctgagtgaatgagttaagactttggggacttttgggaaggcatgattgtatcttgcagtgtaagaaggacatgagatttggggggccaggggaagaatgaaatggcttggatctgtgtccccaccaaatctcatgtcaaattgtcatccccagtattggaggtggggcctggcgggaggtgactggatcatgaggatggatttctcacggagggtttaacacaatccccttgggctgttctcacggaagtgagttctcacaagatctggtcgtttaaaagtgtgtagccctccccaccctctcattcctgctctggccatgtgatgtgcctgttcctgcttcaccttccaccatgattgtaagcgtcctgaggcctccccagaagctgagcagatgccagcaccatgttttctgcacggcctgcagaactgtgagccaattaaactttttttctttataaattacccagtctccagtatttcctctttttttttttttttttttttttttacggaatttcactcttgttgcccagcctggagtgcaatagtgtgatctcagctcaccacagcctccacctcccaggttcaagcgattctcctgcctcagcctcctgagtagctgagattacaggcatgtgccaccacgcccagctaattttgtatttttagtagagatggggtttctccatgttggtcaggctggtcttgagctcctgacctcaggtgatccacccgcgtcggcctcccaaagtgctgggattacaggcatgagccaccgtgcctggcctcaggtatttctttatagcaatttgagaatggactaatacacaacctcacaagtgttttcatacaaaaaggaggccatcttttgtaaaatgtccatcccagaaaataaccatcgattatccttgtagattcactgttacttccaaatatctgtgtgtgtatgtgtgtatgtgtatatgtgtgcgtatcccaaagtcatgatattcacatgggggtggtgtagacagaaaacagggactactagaattcaaaattaaccctaatccttggagaagaaaaaaggtgtctattctatttgtagtattcatccaaccaaccatgtaaacatttatttacacatccacacatctattcaccccacgttgatccatctgcccacccacccatccttccacatagtcacccatccatgaatccattcaaccacccatcaattgatccatccacccatctattcatccagcaaagaaagaaaatatatctccaagaaaaaaattgtgagctccgtaatgatacatttattcatgtatttattcactaaatgtaagctgaaagtcactttccagcccctctctgaattcgcctccacccattctcttccttgctcactcctcttcagacactgtggcctcctgtgctgttcaaacggacaaaaatcttcatctccaggtgtttccaggctctgttccctctgcccagaatggttacttccctggtaatccaaagtttcccgccctcccttcactcaggttgactcaaataccgccacctccaggaagacctccttgaccggctgctctgaaagatccctccttcactccacatctcacctgcttacgctttgtagaacttaccacgatctgttattttaagttaaacttattgactgataaacccccaaagataaaggattcataagaggagagttgtcttggcttcaaccctatccatcacatttaactcagtgctgacccatagtgggatgtcaggaaatatctgcagaatatacatacatacacttttttttctttttgtttttctttttgagacagagtatcaccctgccacccaggctggagtgccatggcatgatttaggctcactgcaacctccacctcccgggtacaagtgattctcctgcctcagcctctgagtagctgtaattacaggcgcccacaaccacgtgctgctaattttcgtatttttagtagagatggggtttcaccatgttggccaggctggtctcgaactccagacctcaggtgatccacccacctcggcctcccaaagtgctgggattacaggcgtgagccactgcgccccgcccacatatacttttgaatgaagaaaggaatgaatgaataatctacctgagcacagagattgggcatttatttatttatatttattctatggttttgtttcccagatgcagatggagcgtgtaaaacagaaagtggctccatgcaggctgctaggtctgctcacctatctcatgatctacacgcacacacagcgcatacggactgagtcagtgcacgctagaacataaactgcttctgttgctggtgctcagaatagattcatgattttactctgagtcagtgaaggctctcgcagccgctggtaaatttgtttttctccttcttcaaagatgggtagcaatgacgcacttcagcgcgcacaagatccgcagtcgcacggctgaggttgagacggcgccaggcaggccgcgtccccagtgatgcgaatccgaagccccccgaccgctgcccttcccacgcaggaccccgcgatctgcggggacagaggcggcgcaggctgctgccatggaaaccgaagctgggggagggagttgggggatgcagaagggcctgacagccccttagaggcccgaatgtccacccctctgcagtcaggttgtacccagtcaccaatcccagcctggcacacagtaggcctgcaacatagagtggaaagccacagtctgcgccccccatcaccccgggggagggggctccctccagcatcctggagcctggccttccttgaatccgttttccgaaggcgtttctatcccgggccccacgtcgcggggtggcgcaacgtgagccatgtatacaaagcacctcctgggctgctttgtggaaaacaggctgggcaggcagcattgctgagaacagaggctgaggcttctgcggacacccaggaaaaagccagagtgacttggatgccgttgaggatgaggaggatggacagagtgatatgaaaattgtggatggaaatagttatgccgaggcagaaaagagagacatcctggccacgcagcgccagcctgtcctgttttattatttgaattttatttgaacccagaagagcagaagctaatcactactcagccttgagtgccgcgtgctagtcctgccacacagatgatctccatgcatcctcacaactccccacggctgagtgcggcatggtagtcaccaccacagaacgaataaggaaactgagtctgaaagaggtgaaggcaactgccctaaatcagaggactggaaaacacggagctggatttaaccccaaatctgacaccttcagagcataaacgtggtgcacccacatcattcaagcttgaagttgagtcgggtaatccattcaaacagaaagacgcttaaaatattgtggtagcccttggaccacttctcttctctccttccctctcctcccttctgttcccttctcctcccctcctttgtctcttctttccccttctctcctcgtcctctcgtctccctcctcctctcctcatcctctcttctccgtccccttccctcccctctcagcccctcttctccctccccttcttcccctctcatctcttctccctccacctccctcccctctttatcccctcatctccctcctcttccctcccctcatcccccttctccctctgcttccctcctctctcatcccctcatctccctccccttccctcctctcatctcttccccctccacctccctcccctcctcgtcccctcttctccctctccttccctcccctcctcatcccccatctccctccccttctctccccctcatcccccatctccctccccttccctcccctcctcatcccctgttctccctctccttccctcccctcctcatcccccatctccctccccttccctcccctcctcatcccctgttctccctccccttctctcccctctcatccccccatctccccccttccctccctttcatcccctcttatccctccacttccctccctctcacctcctcttctccctccccttccctccctctgatcccctcttatccctccacttccctccctctcatcccctcttctccctccccttccctccgtctcatctcctcttctccttcctcttccctccctctcatcccctcttctccctccccttccctccatctcatctcctcttctacatccacactccttggtgctgttatccaatctcacaggtttaaatggagtccatacactgatgactctaaaatctgtacctgcagagtcctgacactcacctgaatccactgcctccccttcccagtcctgactcacctgaatcttctccctccccttcccagtcctgacactcacctgaatccaccacctccccttcccagtcctgacactcacctgaatcttctcactcacctgaatcttctccctccccttcccagtcctgacactcacctgaatcttctccctccccttcccagtcctgacgctcacctgaatcttctccctccccttcccagtcctgacactcacctgaatccaccacctccccttcccagccctgacactcacctgaatctgctgcctccccttcccgagcatctcatagctttcccaaactcaactaatattccctgagtttgtatatgcaccaagcactcttctaattgttttacagttgttaacatatttaattccttcaacagctgtaacgcccattttacagatgagaaatctacggcccaatttaccaaaggaactcactagaggaaacagtgagtgggagactccagtttacatggagctcctccatgatgcctggtctcagccttccgtgtgccacctccctcgttccagggtccttatgaggctccgttgtcctctgggcctttgcacatattgttcccctgccttgaacactgttccctgagcttgattccaggctcttcatcatcaacctgccccactgagggcaagttagtaaactcccagaaactctgtgtttcatcagtcattgatgttgggcatcttaggacatacctcataagggtattgtgaaaactaattacaacaatatgctggccgggcacagtggctcacacctgtaatcccagcattttgggaggccaaggtgagtggatccttttcttgttaaattgatagctagattgattgatagattgatgacagacggatggaagatggatgggtcgatgggtacatggcagaatagtcaggtggatgtgtggatgaatggactgggtgagtggaaggatgggttgatgggtggataaatggatgtgtttgtggatgaatagatggtcggatgtatacatggacatgtggttggatgaatgtttggttgagtggatgccacacataaacacttttcttttccaagggtgagttttgagttctagaagttccctttgttttctgtctacgttaaccacatgtgaatttcatgacattgggacacacacatccccactcagaaataaagtagcaggggatgaatgaggaaaatggaaagatggcctcctgtttccctgctaacacctgtggggttgaatgaggttttcatcatcaatttccatcttcctgattcatgagtcaagtctctcttcctacaccctcctgactatctcggtgagatttgcattcacgatgtcatacgcaaggatggtgcttctttgagttcatctggaccagagacatctgtacagtagctggtatgctcatctctgcctacacttttttatttcatgagacagggttttgctccatcaccctgggaagaggctggagtgcagtggcatgatctcggctcactgcagctttgacctcctggggtcaagcaattctcccacctcagcctccctagtagttgtgactacaggcatgcactaccatgcctgactaatttatatatatatataaaaaatacacatattatatatataatatacatatataaaatatacatattatatataatatacatatataaaatacacatattatatatataatatacatacacatattatatatatataatatacatatacatattatatatatatttgtttgtttgtttgttttgagagggcgtctcactctgtcacccaggctagagtgcagaggcgtgatctcggctcactgcagcttcaacctcctgggctcaaacgatcctcccacctcagcctcccgagtagctgggactacaggcatgcactaccatgcctgactaatttatatacatatacatatattatatatatatatatatatatatagagagagagagagagagagagagagagagacagagacagagacagagacagagtctcactctgtcacccactgggctagccctctttctaagcttcggtgtgcacgtgaatcccgtgaatatttattaagtgcacattcggattgagtaggtctgggatggagcctgcaattctgaatttcaggcaggttcttaggggctgccaaggctgctggtcttcagctcacaacgtgtgcagtgagttcatgctctggttgacctttaccaatgtttagttatacccagaaaacatttgtgagctaaatataaatatatacaatacttatagaaaatattaaatatatttagtaatacatttattacatattcaatttagtatataatattattattatatcaatattatacattataacatatatataattatatgaatttagtttatattgcataatataaataatatgtaacattatatatagcataatatatattatgtatcatcatatgtgttatataagatatatcatttgacatatgtattatatataatatattatataaaattatatataataatcatatgtgattctataataatttaatacatttaatatacaatatacaataatttaatatataatacatatttaatcctatatttatatatttagtaactatattatatatatttaataatataaaatagtatttatataattcatatgtatagtacatgttaataaatatgcatgtttataaatgaataataaatatacttgtttataaatcatacaaaccactgtaatgtataatataaaacaagcacaaaatgtaagaattttaaaagacatgacaacataacacatagaaactgaacttgtaatggtatcattcccacctcagacatcaccattgtaaacgggagatgtagcttagaactgagggaagaaacggaagtaaagagaacaggaaaatatagaaagttatctaatctgttgagggtctcctgaagatacatttctgagaccaacttgatttgctgatcaactagacgggtgacaaggatgaggttgatttttaacaccactgtacctgaagctccaggagattgggagccgccacccacgtgtgtaaatgcgccatgggccacacgtccagtccatgtcccttccattcttccttctaaacagcttgctgataaccctgcttttcccacatttccttcctaaattactgcagcaaccccgtccatttcttcagcccctcaaagtgaaatctaaaaagtcctcttcattccgtagctcttcttggggttcctgcagctcaggataaaactcgactcccctacaaggaccaaagcagtggacactctttagtttgaccctgggaggagcttggtcagggaaggccgacagccaatgggacttgtcttgaagctgctctttgcttcaaattcttaataagcagtctttgcaccacttatgagtgtgtgtttgtgtgtgtgtgtgtgtgtgtgtgtgtgtgtgtgtgttctggtcgctccataacaaacaccccaagcttaacaacatgcaacaacaattattttgttatgtttgcagattcataaagtgcaaggtgcagatggcttctttctagtccagtatgtctggggctagaattaggaaggaaggaagtcagttaggaatattcgatggctgggaaaagcccaacatttagaggggtgtaaagtgaggttagaaagtactaacagtgaaagctgtatcattgcctgtcttataaactatggcggtagttctcaagctgggatgctcttatcccccagtggacactggcaacgtctggacacagttttgattgtcactactggggaaaggaatgagttctgggcatctaatgggtggaggccagggatggccttcagtgcagaggacagtccccaccacacacacaacaaagaatcatccacccagctccaaacgtcatgctgtagtttggaattgccttcaacaagcatatctgaaaacaggtttgtatcgtggcaaggaaacgtgaaatgtgctcacataagagccagctgtgcgctgcacccctttacaagcatgtaggacaggaattcattatgtcagacaatgagaagaaaagacagccagccccaggaaattaaagaaaagctggctatcaacagcatctaggggcacaatctgcaaagcagacagctgcaatttgaatgtttggatggttcagaaatggacagttctgcactgctggccatgatgagctgtttccaagagctactcccttcctgagtttcctggagatgcatatatttcctggacctcagctgaaccctgggtttgtctcttggagggaacaatccgtggtgggtcagtgagctgagcttgagtcgcaactggactgtcttgactttctaactgcatcttgttggataccatggacttcatgttgtaacaataagtatctagtcaggcatgtgcaaggtgggagggggctctcccgaccccaccaagaatgtcaggtgaccatcaggtgatggccagggagttgtcacactgcctttctaaaataataactggtcacagccagtgctcggtaaaagcagtttcccaattgataaaaaacacctgaaactggtgattggcagcttcccactaagatatcaagagtcgggcgagtgggctggagcatgcccatgaagagacaaaatggtggagcttaactggtatttgaccttctaggggcattccaccgggaaggggaagagcgcctcaggtgagcgtgcacataactccagtaaacacgctgcatgtgtggcccctcccaagtgctagcaggccaccgagcatgcaggcagctcatgataagaggagaatcaagggaaatgggatgcaagatgctggaagtatgccagcatataaaaccctaagtccacggtcaaccagggcactggtccttcaagttgcccacttgggcctcttccaaaggtactttccttcctttcattttttctgggggggacccacaagtcattttatttaggagaccatctattctgcttttcttttggctactttttttctttatttctaaacaaaaacaaaaaacaggacacatgtgcacagcgtgcaggtttgtcacataggtatacatgtgccatggtggtttgctgcacctgttgacctgtcctctaaattccctcccctcatctctcaccccacaacaggtcctggtgtgtgttgttcccctctctgtgtccacatgttcttaatgttcaactcccacttacgagtgagaacatgcggtgtttggctttctgttcctgtgttagtttgctgaggttgatggcttccagcttcctttccttttattcttgcctttcattctaaagctttttaataaacttccactcctgctctaaaacttgcctcactctcttcttctgccttatgccccacagtcaaattctttcttctgaggaggcaagaattgaggttgctgggcacccataaggattcgcctctggtaacgtattttggtgctgggtcacttggataatttgcattgctaacaatatcagaatgttccctccaactgaatcttctttttcatgcaagactggacacatccattctgtgaggtgtgtttttagagaaaaaattaatccatgatacttgttaaagtggtaaggaacactttcttcaggaccatggagataggtataggggccacagcaatgggatttcacactggggcagagaaactgggcttaactctgaatacagcatgagcaagtgcgaatgtatagcccaagagcagggtaggtgtcagtggatgaaaaattattgagagaaaatcaaggtggtagcctggctgtgttcactgttccatgctcagtgttcaagagatgtacttttctgaatggtgaaaaatggtatctgagtccattaagattgtcagggaattcaggctaagtagcctctcagaatccttgctgaagacaagccaggttggtcagatgttatgtaggggttcacagagggtgaggaacccaatcaggcatcgaggaaagcacaaacctgaggaaatagacacttctgggaactttacaatggcaggagtacctgcaaattggattttctgcagagacacatttgccaggttacaacaaagtcacctgaacagatatacactgctttttaaatatataattcaattttgtgaaggtagggcctcactccatcactcaggctggggtgcagtggcacactcacggctcactgcagcctcaacctcccaggctcaagcagtcctcctgcctcagcctcccaagtagctgggaccacaggcacatgccaccacactcagctaatttttgtttttgtttttgtcgtttttgtagagatagcgtttcaccatgttgtccaggctggtctcaaacccctggctcaagtgatcctcccaccttagcctcccaaattgctgggattataggcatgagtcatagggcttgaccttataattatatatttttagagctgttttaggttcacatcaaaattaagcagaaggtacagagtccccatagctctgtaccacacatgcacagcctcctctatggtcagcatcccctctggagatgtaaatacagactggatgccccaggtgcattggttacagtcgacccacctgcactgacccatcgcccagactccatagttcacatgagggctcttggttttgtacattctgtgggttcagacagatgcatactgacaagcatctaccattgtcgtatcatacaggactgtttcactgccctgaaattcctctgtgctttgcctattcatccatctctcccccgcttacctctggcaaccacagatctttttactgtctccatagttttgccttttccagaatgtcatgtagtgggaatcatactaaactaaacacactctcatgatccagcagtcatgctctttggtatttatccaagggagctgaacacttatttccaaacaaaaaccttcacactgaggactatagcaattttattcataattgcaaagacttggaagcagccaagatgtccttcagtcggtgaatggataaacaaactggtccctccaaatgacagaatattattcaggactaaaaagaaatgagccatcaagccttgaaaagacatggaagagatttaaatccatattgctgagtgaaaaaagctaatcagaaaagtctttatttttttaatggcagcttgatgtcccattggacaggtacaccactacttattttaaaatcccatttggggatgacttttaaaataagactttgagacaattaatggataactaatctctagctatgaaaggtctactgcactgaagaactttattggtgaatgtaagagttcaagaaacaggaaagaaacacacaaagatgctcaacagtcaaagacatgtttattttggagaataaacctgagaggggcttctgacccatttcagtcaggtgcattctctctcttacagattaaaagtatttatgggttcagagcgagagaacctgtcataggcttggaacatttgtgtgtggcggagaagtttattgcggggttggaatgcctctggttggaggtgaggttatctcgtggctgacatctctccagtcagaggggaggttatcttggggctggcatgtctctggtcggggagaggtttatcttatagttggaatgtttctggtcggagatgtcatttgtggtttatggtcatgctgaccttcaccattaggctgatgccctttggatttaggagatttttgatcaaggtgaacttttaaatggtggtgcttgtccaagatggcgatactcctgctctgtcagtgaatattttaaacgtgtgcataatctctcagatagatcaagctggggcaccaagaaagatcaccataggcctctataggatggattttttaatgttcctttcatttagaaacatgtgctcggcttcccctaaaccctctctcaggatattttacttttgttgatgactcaccccactcaccacatctacttagggccatgatattggagagtcagattctataccgtacatttttttaaatggctgtttatccgtggaacacactggaaacacctgcccatgccttgacgtggacttctagcctctacaccaagataataaatttctgttgtttcagccactcagtgtgtggtaatttattttaaggcagccctagcttaaataaagtactcataactcattcataacaccccatttttttcacatttctgccaagactctaattaagaataaataaagctgtgcaaaataagagcgtaacaaaacaatggtttcatcctcattcctagactcccctcccccagcctagcttctcagtctgcctctggggctcccacctgttgtgagacgcaggggagatgtgatgaggggatcccctggtgctgccatggaaaccacaccaggagtaagggagaggcgtggctgggaacaagggagggaaggcctcagagagagctctggaaagtgtctgggtaaggttgccccaaattccatcctagcacacagtatatgctcaataaatatttatggagcaaattaatgaaattaatgaaattctgcaactttttttttttttgaggtggagtcttgctctgtccccaggctggggcacagtggcatgatctgggctcactgcaacttcctcctcccgggttcaagtgattctcctgcctcaaacacctgaggagctgggactacaggtgcccgccaccacacccggctaatttctgtatttttagtagagacgaggtttcaacatgttggccaggctggtctcgaactcctgacctcaagtgatctgcctgcctcggcctcccaaagtgttgggattacaggcgtgagccactgcgtccagcctgaaattttgcaacatttgtctaaagacttcgaacatggatgattgtggttcctaggtcatgggtttacataagattctacttataaaagtacattaaggtggttaaaaatttgttttaaaacctttattaaaatttcttgtcaaataattgttttgtttaataagtgttcaaagttgtgaaaaagcgtgctaacattgttaacagcacagactctggcccctgcaaacagagcctttctcaagcagcttcccccagctcccctctctggctctctttccctttgtctcctcatcttgtttctgtcaccgtcatccgtgtttgaacttacttggcttatttattcattttgtttgttcactggtttttttgttgttctctgggtgaactggtaaactcctgagcactgagaccttgtctgtgtgttcacctcgtgtttccgggacctgaacagtattgggtcattaccgatgctcaacgtacatgttttgaataaatataggatgtgtcaaaggttatttcaaagatgtatatttcctttcactcaacagtatcacttctagaatataccctgcaggtatgcccaaataaatgccaaatatgatatgcatggcgttattttctgtagcttttctagaccagaagaaaagaatggaaatgacttcattgtgcatagaagggtagctggctaaataaaccttagtatcctcacactttggaagattctacacaataaaagagaatgaagttcttaccgtatagatagagaacaatgcccaggatgaattgtcacatggagaaagacaagtgccaaatggtatacaccatcactttgcagaatgtgcatgagagtgtaattatgctcagtagtttatgaataacccattatgcataataacatgggcataatagattgtgcatgataatatttgcataatatattagaacatttttgcatgcatacgtatgtatgtaaaacttcactctggggcaaaacacaagtaattggcattagaaaaattgccactggaggccgggcgcggtggctcacgcctgtaatcccagcactttgggaagccaaggcgggtggatcacaaggtcaggagttcgagaccagcctgaccaacatagtgaaaccccatctctactaaaatacaaaaattagctgggcgtggtggtgcacacctgtagtcccagatactcaggaggctgaggcaggggaattgcttgaacctgagaggtagaggttgcagtgagcctagatcacgccactgcactccagcctgggagacagagcgagataccatctcaaaaaagaaaagaaaagaaaagaaaaattgcgactggaagggagaagtgaaagaacaaagctcagaggtggaagagagaattctttttgttctgcttagcaatttgtactttctttgaaatgaatacatagatttgcaagagtaactaaaaacaactatttatatgatattaagagttctattagtgtgccattttataaatgtcaccataatcattatcgaatgggctagaggttaacatttataagatatgtgcattaaggtgttccaaaatattataacagggactggaaagaaaaaaacattaataaatataagattatttacaagtttaattcatggaaaaaataagcaaacgttggaaagcaaccagtaaacaattggaaatgaaattttaaaaataccaatcacatttatatctaaaaatatgcactatctattgcaaatctaacaaaatatacagaagatgtgtactttaataaagcacacatcattgctaagagaagttaaataagacttaagtaaatagagacacatgtgatgttcatggattaggagacctgacaatgttaggatggccatgaccccagggtattgtaatcccagtcaaattcccagtgccatattttgtagaaattgacccattgattctagagtctatgtggaatgacaaaagatctacaactggccccccaaaaattaggaaaaccaaaagaaagaacaaaattggaggactttatctgatgtcaagattgtataaagctacaataatcaaggcagtgaggtatcagcacatagagaaacatacatcaatagaacagagtccagacacacatccacggtcaattgattcttgacaaagaccatggaacttgacaggaaatggaaagtcttttcaactaagcattctggaacacatatataacttaatttaagatgggattatagacctaaacattgaaaccttccagaaggaactatagaaaaatatcttcatgatgttggaataggcaaatattaggagacaaaaaaagctcaccattaaacagtcagtaaattgaattacattaaaaaaaatttctgttcatcaaaatattctgttaagacatgaatatgcaagccacatggtgggggattatatttacaatacatatgtctgcaaaaggacttataatcagaatatgaaaaaaatgcctacgtcaataataaagggacaattcaattaaaaatgagcaagaaactcgaattggaactttacaaaagaaaatataggccaggcgtggtagctcacacctataatcccagcactttgggaggccaaggcaggcagatcagctgaggtcaggagttcgagaccaccctggccaacatagaaaaaccccatctctactaaaaacacaaaaattagctgggcatggtggcaggtgcctgtactcccagctactcgggaggctgacgcaggagaattgcttgaactcgagaggcagaagttgtagattgtagtgagccgagatcatgccattgcaccccagcctgggcgacagagcaagactccgtctcaaaaaaaaaaaagaaagaaagaaagaaaatatgcaaatggacaataaacacatgcaaagatgtataagctaattagctgacagagaaacgcaaattaaacccaaaataagataacatttcacaattactaggatggttaaaatacaaaagactgaaatactgaatattggtgagaatgtggagcaactggaattctcacacatcacagatgagggtatataatggcgaaatcattgcagacaaacagtctgagtatttctgagaatatcaactgtataaataacctttgactggctcatttcactcctaggtatttgcctcaaagaagtgaaaacctatgtccataaaaagaattataggccaggcgaagtgactcgcacctgtaatcccagtactttggaaggccaaggtgggaggaatgcttgagcccaggagtttaagaccagcctgggcaacatagcaagaccccatctctacaaaaaatacataaattagtcaggtgtggtggtgcacgcctgtagtcccagctactcaggagactgaggtgggacaatcacttagcttgaggaggttgaggctgcagtgagctgtgatcgcactactgcactccagcctgggtgacagagtgagaccctgtctcaaaaaaaaagaaagaaagtttaggtctgggcatagctgtgcagagagatgctagcctaaggcacccaggcctccttttacctggtaaatgcagggaccccataatctgtgcgtttgaaaacctctgcgtgggtcatctcaggactccctgaatgtgtctgtatccctacgtgttgctctcagtcaatccctaaaccttctctgaggatgtttgaagcccccaacctcccttttcaaacaatacaattagctcagggctatgatatttcaggtacaggaagtggcctatgtcatcctaattctgcactggtatgaggaataaatacggtcgttaatccctggaatatcctgaggaaaacgtattcagtttattgagaagaaaatctaatatatgataaagcagctgtttgaaaccgtatgtgattttctcatcaatctctttcctgggttactgagtgggcacgcatgttctttttttcccagtaattgctattttactgtgacattccggtttaagactttgacatttaaatgataaatgtcgtgtctcgaatctcagcacaaaaacacttttctacggaattgctaatagcagtcttcatttgccaattcccaacctgagctgatcctcacacggctacactgttcatgtaatttgagaaatgactcactatccctgagtcgtgattctctgcaaggcacgactctctaaaggtgccacgagacagagactccctccccgtttccaacaaggcgtcttccacaagggaaataaatgttcacctttcttgtctttcaaatgtcaaagaattgttttttcttacggcaaggaactgtccacaggttaaaatttgttatccattttcttattgtgaagtttaaaatacgggtaaaaaatgtgcatgaagttcattggaacaggtgaatacatgacagtaacaacttcctgcgttaggaaagactagggttcccagaacccccaccccttcccatctacaacccccttcctccctctgctgcccccgtccaccccgccagccccctggacataaccactattctgacttttcttttgtttttctttttttcttgacttggagtctcactctgtcactgaggctggagtgcagtggcacaatctcagctccgcctcccaggttcacaccattctcctgcctcagcctcccgagtagctgggatcacaggcacccaccaccacacctggctaattttttgtatttttagtagagatgagatttcactgtgttggccaggctggtctcaaactcctgacctcaggtgatccgcctgcctcgtcctcccaaagtgctgggattacaggtgtgagccaccatgcctggcctattctgacttttctaataatttattttcgggtctttatcccttcactgcctggctaaaccactgtttatttttatttgtaaaatagtaatctttgtatttgttaaaatgttagtaatgctcgctctattttgttttgtttttcactcccccacatctccgtcttccccacattgatagctggttctgtttggttttaaatccccatctactgtggggatttaaggttttttccttaacaattttaattgcggtaaaatacatgtatcataaaacgtaccatttgagggccaggtgttgtggctcacgcctgtaatcctagcactttgggaggccaaggcgggtggatcacctgaggtcaggagttcgagaacagcctggcaaacatgactactaaaccccgtctctactaaaaatacaaaaattagccaggcatgttggtgcgtgcctgtaatcccagctagtcaggaggctgaggcaagagaatcgcttgaaccccgggtgaggcagaggttgcagtgagctgagatcacgccattgcacttcagcctgggcaacaagagcgaaactccgtctcaaaaaaaaaaaaacaaaacaaaaaacaaaaataactgtagcatttgagccatgttaaaatgcagagttgagtagtattagtctattcccattgttgtgcagccatcaccactgtccatttccagaactttccatcatccaaaactgaaactctgtagcccttaaacaactcctcccagcccctggcagcctccattctactgtttgtatgtatgaatttgatgactcaagacacctcgtctaagtggaaccaggcagtatttgtccttctgtgcctggcttatttcactgagcatcatgtccccaaggttcacccaagctgcagcgtgtgtcagagtttccttccttttgaaggctgagtaatattcccccgaatagatggaccacactttgttacccactcccctgtcaatggacctttgggttgcttccgcgtcttccttctgtgaacacgtgactgcccacagcttcattcctaggccatgcaggagtgaacggccgatacagagatattaatcaatatcttcataatgagggcaggaataaaggagaagataagtgaatgatgagaggatgtctcagacacctgcacagctgactagaaaactaagatttctggccaggcatggtggctcacgcttgtaatactagcactttgggagaccaaggagggaggatcacttgagcccaggagtttgaaaccagcttgggcaacacagcaagaccctatctctacaaaaaataaaaaattagccagatgtggtggcacatgcctgtagtcccagctactcaggaggctgaggcaggagggtcacttgagcctggggaggttgaggttgcagtgagccatgatcgtgcccctgcactccagcctgggcgacagagtgagaccctgtctcaaaaaggaaaacgaaaagaaagaaagaaaaagaaatcgatttctgagcctgtagaggctgagcacaatctggtttttcccttccataaagtccttatccacggacgtgatttaacacacataaatcacagtcaccggcagtggataaaaacctcggcctcaagtcctcgtctctgcctttctatccctccagctgggccaatttctggtccattatttcagggctcaatcccagcccctccccagctctcatggccatgggaaattgaggtaagctcagactgctgtcatggaaaccagagtaattgggagaaaaggcagagcgctgaagaatgctgtacaacgttattagtattcgtatatgccagatcttatacaaatatatgaaaatgctatcatttgttgtaaaaaaaattatagttagaaataaatgcacataaagatgctcacacaaacaacaactctggaaggacacacaagaaaattattaattgaggccgcgcgtggtggctcacacctgtaatcccagcattttgggaggttgaagagggtgggtcacctaaggtcaggagttggagaccagcctgaccaacacggtgaaacctggtctctgctaaaaatacaaaattagctgggcgtgatggtgcatgtctgttatcccagctacttgggaggctgaggcaggagaatcgcatgaacccaggaggcagaggttgcaatgagctgagattgcaccattgtactccagcctgggtgatagagcaaggttctgtctcaaaaaaaaaaaaaaaaaaaagtgactacaaggtttgaactaactcaagttagaggcctactttaaaccttcagccaaaaatccgttaaaaatacacaagcagttagtatttataagagcttctactagaaaattcttccaaaagatcttcgcagaggcagaaaacaaataacaattgagagacagggttgtaagggggtgctatggtctgaatgtaagtacctcctcccaccgaattcctctattgcaaccctaacccacaaggtggaggtattaggaggtgggggccccaaggaggtgatcagggcatgagcgccttcgccccccgaccattcgaagatacagtgagaagaggccacctgtgcacctggaaacgggccttcagcagacactgcccctgctggtgccttaaacttgaacttctggcctccagaaccatgagaaatcaatgtctgttgtttataagccactcggtctatggtattttgttgtagcagcctgactgggctaaaacacagggtttaaatactagggcaatgaccgataaacaacaatcacgttcataacaccctgaaaatgaacacttgcaaataacgtgagaaggaacgaattttgctttatcacacgatgaactataacatttcacaagtcaacaaaaacgagaaaagtgcacacagagatgaacgggcgaggcttctcacgaggaatgcagacaggaaaaccttctgtgcttttcccagtaatctgagaaattcatgggaaacgcacacatgaaatccaattttctcctaatggatggacagacagcagaaaggatggagcaattaggcattgccatggaaacctgattgagaaggagaaggggaggagctgagaagaggggccgagagcacccctcaccctcaggctctgcagccagacagtgaagggccagccaggctgcagggtatatgcaggtgtatttgtgggtggataattaaaatgagggacaggccgggtgaggtggctcacacctgtaatccccgcactttgggaggccgaggtgggaggattgcttgaggctgggagtttgagagcagcctgggcaacacagggagatctgtgtctccaaaaataattagccaggtgtggtggtgtgcacctgtggtcccagctactcaggaggctgaggcgagaggattgcttgagcccgggagattgaggctgcagtgagccataactgcacaaatgcactccagcctgggcaacagagtgagaccttgtcaaaaaaaaaaaaaagagcagaggtggcttctcaatttgggagaacaatctcttctacctcgttgggtcactgcgagaactggatgatgtttgtaaagcatgtggcccgtttctggcgtgcatgtgctgggatttccacagggacaggtagaggtgcagctaggagaatccccaggatgtgggggaagctgggcagagcacagatccctggggtttaccccagttgaatgaagatctcttgattggaaaactgcacttcctctcacaatatgacagaggtccgtgttagcctgctatatttatttgtgtgtatttgtgtcctttttttttttactatttattatttgctgaaatattctttttatttattattattattattattattattattattattattttgagacagagtctaactcttgtcacccaggctggagtgcagtggtacaatcttggctcactgcaacctccgcctcctgggttcaagcgattctcctgcctcagcctctagagtagctgggattacaggtgcccaccaccacgcccagctaattttgtattttagtagagatggggtttcatcgtgttggccaggctagtctggaactcctgacctcaggtgatccaccccccttggcctcccaaagtgctgggattacaggcatgagccaccacacgtggcctattctttttaaaaacaattttttgttctcctggtaactgtggttctccattcatcccagtgtgttccctgaaagcagagatccttctccaaattcatgttgaagtcctaaaccccagtacctcagaatgagattgtattttgagatgggcctttacagaggtaattaaggttaaatgatattatcagggtaggccctaatccaatatggctggtgtccttatagaagaggagattaggacacagacacacacagggggatgaccacgtgaggagaggagggaagacggccaaatacgagccaagcagagacaccttagcagaaaccaaccctgcccacaccttgatgttgacctgcagcctccagaactgtgaaaattttctgttacatgagccacccagtctgtggtactttattatggctgccagagcagactaagacagtcacccatttaaggggaaaaaaaaggaagttcaggttgaagaaacaggaaacattctgaaaacatgcatataatcaacaagaaaacaaagaattatttagcatattagaaatggaaaaaaagtccgggcgcgatggctcatgcaggtaatcccagcacttcgggaggctgaggcaggcagatcacctgaggtcaggagttcgagaccagcctggccaatatggtgcatccccgtctagaatatgaagcaggcagaagaacgtgaaaaactagactggcttagcctcccagcccacatctttctcccatgctggatgctccctgccattaaacatcagactccaagttcttcagttttgggactcggactggctctccttgctcctcagcttgcagatggcctattgtgggaccttgtgatcatgtgagttaatatttaataaactccctaatatatcctatcagttctgtccctctagagaacactgactaatacacccagacttgcagaatcaccctcaccttcaacaccagcattctggcctgggggctggacatgcaggctggcctgttcctttgcaatcatcccagcatcacagaggccactgtggctgcatggacctatcactcctgacctgttgttactccctctcctcatcttccctgtcctgccccttgagacggctccacttcctgaactccccaaatccaacttccacattccatcttcattgctaacaccctggaccagggcactgagatctctaccctacaagaccacggcaccctcctcatggggctccccacctccacaccaggccctgggtcctccaccttcccaacaggagccagagggagagctttaagtcataaaacagatgatgttgcctctccttgccattcggacttacaactttccagtggcctccaatgaacctacaatgaaatccaaaatccccagcataagagtatgtaggagaaggaatttgaaaacatctagaaaaatcgcatgcacatgttccctctggcccagaggtgattggtcaatacttatctaaactgcaaacacacataaccttgaattaaatactgcaattaaattctcagagttcatccagaagtcagagcaagattcgccaacataacatctgtgtaataagactgttcagtgtaccagactattattattattgtaacagaaactcatcaggaaacgtgtccatgaaattgtcagaaatctgcaaatgcaatgttctatggacataaataaggatgtgtaatgtctttgtgtattgatgatataaggtcgtcaccaagatgtggcgttaagtgataaaagcgaagtagcacacgatgcaatcctgggtttcttgctgtgtttttaaaagaggagaagggagtaaggctaagggtatatgctggtgctgatatatgtacataacagctctgcaaggaaacagaactggaaattggatttgtcgctagacttttgtgcagacttttcttctaaagaacctagtactcaactcagccattgtgagggcaaaagcagtcacagacaattcataatgaatgtgcttgactgtgcccaataaaactttatttacaaagatctgtagagccagatgtggcctgtggaaaggatagttttctgatccctggtccagagaatgaaaactcgggatggggaggatagatgaggatcaaaatggaaaaagaaatgtatcatcccaaaatcaatgtacaaaaatgagtagcatttctatgcaccagtaacattctagatgagagctaaatcaagaacacaatcccatttaccatggccacaccaaaaaaaaaaaatacctataagtatttctaaccaaggaggtgaaagacctctacaaaaacctctacaaaaaaaacaaaacagtgctgaaagaaatcagtgataacacaagtaaatggaaaaccattccatgcccatggttaggaagaatcaatattttttaagtggccatacttctcaaaacaattttacagattcaacgctgttcccaccaaactatcaacatcatttttcgcataattagaaaaaactattttaaaattcatatggaaccaaaaaagagcctgaatagccaaaacgatctgaagcaaaaagaacatagctggaggcatcgcattacccaactttaaactatactacaagattagagtaaccaaaacaccatggtactggtacaaaaatagacacatagaccacaggacagaatagagagcatggaaataaatctacacacctacagccatctgctcttcgacaaagtcgacagaaatgagcaatgagaaaaggacttcttattcagtaaatggtgctgggataactggctagccatatacagaagattgaaacaagacacctacctatcaccatatacaaaaactaactccagatggattcaaggcttaaatgtaaaatctcaaaccataaaaaatcctaaaaggaaataccattcttgatattggcctcagcgaagaatttacagctaagtcctcaaaagcaattgcaacaaaaaaacaaactgacaagtggacctaattaaactgaaaagcttctgcacaacaagagaaactatcaaggcagtaaacagacaacctacagaatgggagaaaacattaaataactgcgcatctgacaaaggtctagtacccagaatctttaaggaatttaagcaaatcaacaagcaaaaccaaaataatcccattaaaaagtgggtaaaggacatgaatacacacttgtcaatagaggacattcaagtggccaacaaacaaaagaaaaaatagcatcactaatcatcagagaaatgtaaatcaaaaccacaatgggataccatctcacaccagtcagaatagctgtttttaaaaagttaaaaaataacagatgctggtgaggttgtggagaaaaggggacagttatacactgctgggagtataaattagtccagtcactggagatttatcaaagtactaagagttgaactaccatttgaccaagcaatcccaatattggatataaatccaaaagaaaataaattattctaccaaaaagacacatgcacccaaatgttcatcgcagcactattcacaatagcaaaaaaggactcactattcacgatagcaaaaatggtgcctatcaatagtggattgtggtggccaggcgcagtggctcacacctataatcccagcactttgggaggctcaggcgggtggatcacaaggtcaggagttcgagaccagcctggccaacatagtgaaaccctgtctctactaaaaatacaaaaattagctgggcatggtggtgtgcacctgtagtccaagctactcaggagtctgaggcaggagaatcaggtgaacctgggagacggaggttatgctgagctgagattgtgccactgcactccagcctgggcaacagagtaagactccatctcaaaaaaaaaaaaaagaacatgtggtacatatacaccatggaatactatacagccatgaaaaagaatgaaattttgtcctttgcagcaacatggttgcagctggaggccttgagctgctggcccatcacacaagcccaacctggcctacctggtgcccattgatccaacctgaatcctcttgagagcttttacctgttgtgatgagggaggaagtctcaggattggccatggaagctgcagctgaagcaagggaggagaagggccggcagaatagtccccaaagtatatcgttaagtaaaaagcaggccccaaagaggatatatgagatgctctcattggttgtttaaaataagaggggaagattatggtttggatatagatgactgaatagatacatagatagatagatgatcaatagatggatatatatatatatggcagataggtagataacacagatgaaagattgatagatggatagatatatatgtaatagataagatagatgattgatagatacttgataaatagctagatagatgacagatagatggatagataagatatatagatgggtgactgatggatgaatagatatacacacaatagatagatgatatgtactgatagacaatagattaattatagaaagaaagaaagaaaaaagagatagggagagagaaggaaggaagagaggaacgaaaaaaggaagggaaggaggaaggaagagagggaggcagaaaagagaaggaaaatgtgtgaaatgacaaaagggagaagtaagaggatgagggatcaaggctgagagaaaggttcttctctgtatcacctttggaactgtttgagcatgtattacttctccaaaaaacaaattaagatatgaagtccacaatcaggattgaacaaaaaatgctagccacgtaaataccgtcctatcagaatctgccctcacactttccaccataaccaatttcaagtggattggaaatgaacaccaatgtgacctctgtacccaggctttccaaaatataacagcagacttagatcacacggaggacatgatgacacaagtagcagcaagcagcttttgaaatcttcctgatatcacacctctgttaagtaatttgcaaatattatattgatcagtctcaaaaaagggagttgtgtttgcaataacagcagcgttaactgaccacttactatgtgccaggcactctcgtgacttatatttttctataaatctatattttaatttatatataattaaatactttacatataattatattttttaaatttatataaaattctttgaatcctcacacaacacctgtgtgagaggaactgtttttatcttcaacacacagatttggaaactgatattaagggaattgcataagtcaccagctgagaggtggaaaagccaagatgcacactcaggctgtgtgactacctcctctccttccccctcctcaccctgtccatcaccacttcccgttcgttccacttccagaacactccaaatccatttatctcaatggccaaaactgacaccagaccctgtctctctccctccaatgaccccaaagcaaccgcttcaaggatctctctaattccatgctagccactttgctattttcttcatgttacttcccacatgtgagcaatgggataaaaataactactattgagtgtgtgtgtgtgtgtgtgtgtgcgtgttttcaatgaatgaagcagtaaaccaaaaacaagattctaagcccccaaccatctgaatggactcctcccatccacagggcattctaaagttaacctgaaaaaagtcgtttaggccatgatagtaaagaggaaccaaacatgcctcattctaccctcctctcttttgaaattactcatagaacaagcttcttaagtctgataacaaaactttgcaatctattttctgaagcctgctacctggaggcttcatctgcatgataaaactttagtctccataacccattattataacccagacattcctttctattgataataactccttcaaccaattgccaatcagaaaacctttaaatctacttatgacctggcagcacccacctcgagctctcccacctctttggattaaaccaatgtataccttgtattgattgatgtctcacatctccttaacatgtataaaaccaagctgtacctcaaccaccttgggcacacgtcgtcagtacttcctgaggctgtcatgggtgcgtccttaaccttggcaaaataaacttcctaaattgattgagacctgtctcagatactctttcattcacaaatctgtacatattgtcatgggagcatctggcagtagtcagtgctttatggtcattggttattaagttcaatcatgtctcacataacgactgcatatatgacggtggtcccataagattatcataccacagatttaccatacattttctatgtttaggtacactgatacttaccattgtgttacagttgcttacagtattcactacagtagcttgctgtccaggtttatactctcagaccagccctgtaccttgtagcccaggtatgtagcaggctctggcatccaggctggcgtaagtgcactccaggatgttccacaataaagaactcacctaacgaggcatttctcagaatacatttctgtctttagtgatgcatgacagtacatgcaccataataaagaaatattaataggctgggtgcagtggctcgcgcctgtcatcccagcactttgggaggccgaggtgggcagactacgtgaggtcgggagttcaagaccagcctgaccaacatggagaaaccccgtctctactaaaaatacaaaattagccaggcgtggtggcacgtacctgtaatcccagctactcaggaggctgaggcaggagaattgcttgaacctgggagatggaggttgagatgatcatgccattgcactccagcctgggcgacaagagagagactctgtctcaaaaagaaaagaaaagaaaagaaaagaaaagaaaagaaaagaaatattaatataagccatgaccaattcacactgtttatatagtaacataaatatcagtacatattcagtgctcaagccgccatcatctctcccctggatggcagcagctgcagcctctcactgactctctgactccacgccagcctctctctcatccctcctccactcaggagccagaaggagaattgacaacactcacagaccacatcacctccacaatcaagactcagtgtcttctcagaagagcactattcacatttcttatcttggttctggaaggtcctgcctttctccccttgccttcctctcccaccccattcctgccactggccctgaactcaccctacccagcccacctcagcctattccatttccttctcacctctgggcatcggcacctgctggctccccaaacatctctatggcaggctccttctaaccagtcggacctcagccctggtgtcactgaccacagatggtgttcccagaccctcctgactgacctctgacacacatctgtgctacctcctgtagagagtccattctttttggagatcagttctcgtgtctgttaagtcgtgtatttgttgtccaccttctccacataaattgtagcttcttgaggtccaatgtctcatctttcttatctggggcacataggtggtactaaatacattactgttcatctggtattgttttatgtaactttctggttaatgactgctttacccattcattctaaccatcagcaaggaaggagttgttcacatttatgatctcagtggctacaatagctactggatggatgaatgcatgacagatggatgaatgcatgacagatggatgaatcatggaaggatggttgattggaaggatgtctgggtgggctgatgactagttagataaatgcacaaatggatggtttgttgaactgatggttgcgtggatgtatgtatgttatggattgatgggtgatcaatgggtagacgaatgaatggatggctggttgaattgatggttgcgtggaggtatgtatgttatggatggatgggtgctcaatggatagatgaatgaatggatggtttgctgaactgatggttgtgtggatgtatgtgtgttatggatggatgggtgatcaatggatagatgaatgaatggatggctggttgaattgatggttgcgtggaagtatgtatgttatggatggatgggtgatcaatggatagatgaatgaatggatggtttgctgaattgatggttgtgtggatgtatgtgtgttatggatggatgagtgatcaatggatagatgaatgaatgatggctggttgaattgatggttgtgtggatggatgatatatcaatgaatggatggctcgttggatatatggacaggtgcatgggtattagatggatgcataaattgctgggtggatggatttgtggatggatcaaaacgatgggtggataaatggatgtatgaatagatggataggttcctaatgagaaatgacaatgtctgtgttactcacactaacagaatggaatgtgaattgaaacctgatgatttccttgagagtcagaagaggatttcaaacaccctacccaagacatttagcactgacaaaatccatgtggtgacctctgctggggtccccagattgcccctccacagctgcgctgctcttgcttccctccaccaccctattctgcccaaggaggctcccacctgccatagggatgggcccccagatccactgttgccttggaggtgaggcaggaaagagctgaggaaggggcagagagagccgggagactggaatgttcctgactctgcagtcagtgtgtggcttcagtgtgaaggcccaggcacacagaggccagagaacagaaatattttgggaacaaatacgtgaatagaagtgactgactccacctcactgagcctatgcttaaccttctgaaatggggaaagcaatcatgtctagctcattgagtcatttgagaattaaatcagagggtgcttataaggagctcagcccctcctgacaggagacaggtgtcactctaattgagccttagagatccctgcaccaggatcccctggtgtggagggatggctgctataaatgcaggtgcccaggcccatgccagacctgctgaaggaaagtgcttgcctaagaaaacctaccctccctgccacttgctgctttgttcactctctatatatattttattttcaaatatcatgcagagtttgttttctaaaaaaacattaaatgtcacagctcatttaccaatatgctataaaatgcagttataaccatgcagaggcaagagttgcagaaaaaaaatgcaattgtaaatcattaacatgaaacaataatagaatgaataaaaatgtaaattttgtaatatttcctttcatccctcacaggttcacaaaatattcagtttcagcaacttttaaaaaattaataggctttatttttaaagcaattttaagtttatggaaaaattaagcacaaactacagagagttctcatacggcccacaccaacccaacttccctattatcagcgtcgtgttttggggtggtacatttcttataatcgactaaccaacattgagacgttagtattgactcaagtccacctttctcagtatttttcttccacttatcagaatctgagctctctgtatttgtttctttcgaattagtctcactgtactgcaacaaaggtccctaaagcagtggcctatccatctcgtctacctgcatccccatcccctgggaggagcagggcacacaaggaaacatgaataggtgcccagaggtgcaaagggtcgtttagaaaaagcgcagattcatggaggtgtgaatgaccaagaaatacagatgatggccacaagccaagagaccaaggaagattgcgacccttgtccagaaaatgaggtgtcaggtgtgggagaaagggctggcctcccaaacacaggtggtaggagacttgcttgcctgaaccagaacaggcatagggaccagaatgaccagcggattaattagagaaatgtctttgagccatactatgttcctcgtcctagactaaattacttttagtcctagactaaattactctgactcacttttcctcttaattatatcaacaacctttgaagtgggcataattaataccctgattttacaggtaggaaaactgaggcacagagaggtgaagtgacttgcccaagaatgcaccgctgatcactggaagaaccagaaaatgggaacccaaccagctcacaggtggagaggagggcccccttggactgacctttaaaaatatatagtcattacatgttctgagaaacagccccaggcaatgtcctggaatctgattgctaagagactccaagtggcctggattgtacccaacccagggcctttgcacctgctgttcccttccccagacatttcacttctcatcattcaggtctcagctccaatatccttatctcatttccagagcatcctgtctaaaagatcacgttcttttattttaaattcttcacagagcaaattcctctctgaaatcatgtctttgttaattaatgtattgtctctttcttccctgagttcaggtgcttgtttgtatttggtcaggctctgcctttatgcctaaccttagacctgtctcccaacctcgttctgcacccctgaatgtttgtgacttcttcatcttctcactgtactgccctgcagaagagacaaataacacttacttgtcacatgaaataatgaaaagaacaaaagtgaaatctgagaatagactttaaaaaaaaatgacaaccaaaagattagagtcatggagattctcttctcctgagaaaataaatactgcttttgctcaaatccttacccttctctggttcctggagaaattgtctgtacaatatcaggttagtgagagaaggtttcctggagcccctaaaataaggcagtgtgcaacagccagactccaagatggtcccctctgaccctagccaacaggtattccttcctttgtggttccctcccacattgaagggggctgtgcaaccagtaagatatggcagacatggctgtgtgactcctgaggctgggttctatgagatcttgtggcttctgccttgctttctcttgggtcacctcctctaagggaagccggctaccatgatgtgaggatgttcaagcagtcttatggagaaaccaaggcctcctgccaacagccagagctgattcatcagccttgtatgtgggccatcctggtagtggattctttagccctagcccagcttttaaatggctgtagccctggtccacatcctaaccacaatgttataagagaccctgagagagaaccacccagctaactcacttccaaattcctgatccacagaaactgagatgataaatgtctgttgttgttttgagccactaagttttgaggtggtttgttacacagcagtgggtaactaatacatcaagctgtcagtaaccaccaacattgttcttccaagcccacatagttatcagagtcagaaaaaaatcctctcaatggcctatgacatgacctcatgagagctggctcctgctacgtctctcctttgcttcatactttttcccgcagagtggctgttgatttcagccactatgactctccagcacatttgctcaggcctgctccctctgggggatttggttttgttgtgctctcatcctggagtccttcctgcagtgagcctcatttccagttctctcactccttcagcgcttcctgttcaaatgctctctccccagagactttcctgacctcccttcctaaaatagctgcctccctccaccttctctaccatctcaccctgccttgttcttcttcctaatacctgacacagcatacatttatttttgtttattacctgtcttctcttattagattgtaagctccgaaaggacttggcaatcacctattgggtttcctgctgatgcacaaccacctgagcagtgtggggcaccctcaaaaatgattggttgacactatggaaaacagtatagagattccctaaagaactaaaagcaggacttccattctgtccagcaatcccactactgggtatctacacaaaggaaaagaagtcattacatgaaaaagacacttgcacatatatgtttatagcagcacaattcacaattgcaaagacagggaaccaacctaagtacccattgaccaaagagtggataaggaaaatgtggtatagacacaccatggaatactactcagccataaaaagaaacaaaatgatgtcttttgcaacaacttgtatggagctggaagccattattctaaatgtagtaattgaagaatggaaaactaaatatcgtatgttctcacttgtaagtgggagctaagctatgaggattgaaaggcataagaatgatatcatggactttggggacgcagagaaaggtcgggaaggaggtgagggataaaagactacatgttgggtacagtgcagtcaatgtgccacactgtacattttgatgggtgcaccaaaatctcagcaatcaccaccaaagaacttatccatgtagccaaaatccacctgtactccaaaaactattgaaatgtaaaaacaaaacaaaaacaaaaacaaaaaaagcacaatacttaatgattggttaagtgtggcatggtggctcatgcctgtaatcccaactactcaggatgttgaggcaggaggatcacttgagcccaggagtgtgaggctgcagtgagccattatcacatcactgcactccaccctgggtgacagaacgagaccttttctcaaaaaattaaaaaaatatattggtggccgggcgcgatgggtcaggcctgtaatcccagcactttgggaggccaaggcaggcggatcatgaggtcaggagatcaagaccatcctggctaacgcggtgaaaccccgtctctactaaaaatacaaaaaaagagaaaaattagccgggcgtggtggcgggtgcctgaagtcccagctactcaggaggctgaggcaggagaatggcatgaacccgggaggcagagcttgcagtgagccgagatcgcaccactgcactctagcctgggtgacagagcaagactccacctcaaaaaaaaaaaaaaaaaaaaaaaaaaaaaaaaatatatatatatatatatatatatatatatatatatatatatatatgtaatgttgaagattaaaaatggccaaaaatcacttgatgctccagaagggtagaagggtgtctgtctcccatgtttcctggctctggcctggctctgcaactttttttttttgcaacggaacgtggtagaaacgatagcatgtgcctgccgccgtgaggcccatgaagccttgcagctttcctttccacactcttggaatgctgagaccacagtgctgtgaggaagcctcgcctcgttcactggcccaggaagaggggagtccacatggaggggaacccagaccctggtggagagtccacacaattgctaaatatataagggaaggcatctcatgttcctcccaccccaccccatcctccagctgaatgaggccacacacgtgggcccaggcaaagacagcatggaaccaccagacaacccatgtaaaaaggaagcacactgattttctgtatgctctcaacactcctgacaccaaatatgtgggagattctctcacaccatccaatgctccacttgtcagcagacatggactgggtgtcccacaagttagctcaattatgacactgagtgcccaaaattagtgcagactccagtgattaagggctcaattccacaagactgtccccacccagcttcaaatacccatcataactccccggttgtgacctgtgcttctgacaaagcagctgtaagctgggagttccaataagaacacatggacacagggaggggaacaacggacaccagagcctatctgggggtagcaggcaaggcgggggagagcatcaggacgaatacctaatgcatgtggggcttaaaacctagatgacgggttgataggtgcagcaaaccaccatggcacatgtatccctgaacttaaagcaaaataaaacataaaaaattacaactacctccaccaaaaaaaaactgggggtttccacggccccctcctcaggtttgataatttgctagaacggctcacagaactcagggaaacactttccttactattaatggtccataataaaggctgcaactcaggaacagcccaatggaagatgctgaaggaaaggtgtgcagagagggtgcggcgtttccctgcctcatcaggtgtaccacccgtgttcacctacctgaaaactccccagatcctgtttaggtttttatggagattccattatgtaggcatggttgattaaatcattgcccattggtgatcaattcaacctccagcccttttgccctccctggaggtcaggagttggggctacaaattccaatcctctaatcagatggttggttcccctggcaaccagcccccatcctttggtgtttttcaaaagctacttcattaacataaacttagatataagtgaaataggatttgttatgaataatagaaagacactcctctcacctctatcactcccaggaaattacaagggttttgaagaaacgtgggatgaagacatttcttatcataccatgatagcataccatggaaggtgagaaacaatgagttgttttatatgtcactgcattttgggggctgcttgttacacagcaatagataactgatacattccacgagtaagtagctgtctgacagaccttccttcatctaccctcagcccctccaatccatctccacactgaagccaggacaatgttggaaaatacccatgctggtgtcactgcccagctcactgggaacaatgcaaaggcacctattgctttggggataaagagcaagagccatagatgatgaaccctttcctattccagcatctcctactgtgctgagcctcatcatcctcccctctaccttccagaacttctgggatgtggccagttccctaagaccttcgtatgtcctgccactgtggggtacttgaacacgctatttgatatggtttggttctgtgtccctacccaagtctcatctcaaattgtagtctccatgtgtcaaggccaaaaccaggtggtgagaatcggaacataagggtggtttcctccatgctgttctcgtgatagtgagtgagtttcatgagatctgatggttttataagcacctggcatttcccctgcttgtactcactccatcctgctgccctgtgaagcggtgcctgcttcttctttgcctgccaccatgattgtaagtttcctgaggcctccccagcactgtggaactgtgagtcaattaaacctctttcctttataaattacccaatctcaggcagttctttacagcagtgtgagaacggactaatagagtattcctctgcctggaatgctctctccccactcccacagctaggcaatgccaacacaaccttgagacaccagtttcagtatcacctccacaggaaagcacttctgtaatgctgacatcttatgtaacaatggtccacacacaaatatatttttaatttcacgcacatacacatgcacacatgtacacacatagtgagactccaaaacaaacaaaactctcttcattctaacacatccacgagtggaacttctcagtgagcatttattgagcaacaaccagcttcaagacaccacgaagagtccttaggtccttattacttcttctgaaaataatgttataaagtgatcagttctgaaatggtagaggaaaatctagttaaaaacagaatgtagtcgtagatttgtcaaacagatggttagtgttaaatattttttggacagggttgcctccaacatgttgtctgtgctgtgctgtatccaagaaatccttcccttcctcaattacagggatgcgtgtcctgcttggaatccagcctggcctttggctcaatagaaactccacagacagcaggagagctgaggctccactgtggccatgcagccttgtgtgaaaattctaacggcttctcctcccttggaaatgtttccaccatctgtttccccatacccaggggccaggatgggtgaggtgctcagatcagggccaaaatctaaggaggcagggtgcaaacatcaagtaatcgaggtaattcatattttaatgtaatgtttatttaacatttctgaattaatgcaaaaaaatagacaatgcagaaaataccaacattttaactaaagatgggatctgatgcagttggcattaggaaaagggagggatgtaagtctcgcaaaatactgccttaaaatactatttataggccaggcgtggtggctcacgcctgtaatcccagcactttgggaggctgaggcaggtggatcacctgaggtcaggagttcgagaccagcctggccaacatggtgaaccctgtctttattaaaaatacaaaaattagccaggcatggtggcgggcacctgtaatcccagctactcaggaggctggggcaggagaattacttgaacccaggagactgaggttgcagtgagccatgattcagacactgcactctagcctgggtgacagagagagactctgtctcagaaagaatatatatatatatatatatatatatacacacacacacacacacacacacatacatatatatacacacatatatatacacatacatatatatacacacatatatacatatatacacacatacatatatatatacacatacatatatatatatatatatatatatatatatatatatatatatatatatatacacacacactatctggaatattgaggttttccactgccctttaaattttgcacctgaggccaatgcctcacttgcctgcccctggccatgccgacaccatgtgaattgctcttgggtctcctctccctctccacggccaccaccctagtgttttctattgtatctggcttgaacaaccacagccagctcctaaccatcccctccacgccccagtcttgtccaactcatgaaatgtcactaccacttaacaagccactcaagaccaaattgaggattcattcttgcttcactcctttcctctgaagcctgagtcccacccacctgcaagtcctatcaattccaccttcatctcctactgtctagaaatcgctagacatcaccccctcttccccgtcccacgccatcacctgcggctcagattatcgcaactgactgcatggattttctcagctcctttccgtcctctgcccagactgtcccggaatatggacagattgcactgtgggaatgccatatcagatgcttcggtgctaaagataactgagtctcaccatgataatgttattcgcttgccaagtctttctagttcattcaaagagacgttcctcgtaggtgctggtgtgccttcaacatttccgtcacacttgctaattactttttaaacaaaggagagctttgctcagatcattggcaggcgatggcatctaacccagggtttccagtctcagcactgtggacattttgggctgaataattgtttggtgggtgggcaggagggctgtcttctgcactgtaagctgataagcagcacccctggtctctaccccctggatggcaggagcaaggccctcttccccacgtgtgacaactaaagacatctccagacacttccagatgtccccaagtagacaaagccacccctgtttgagaaccactggtttaggcacacttgtgcatgttgttgttgttgctgttgctgttttttatcattgttctttcttttactctgtcttccacttaagggaggtgacgctggctttccatgcatattcatgatatcaaaactttaaaatgattctcactcgggtgtttaaagttaatgttataggccaagtgcagtggctcatgcctgtaatcccagcacttcgggaggccgaggcaggcggatcatttgaggtcaagaccagcctggccaacatggtgaaaccctgtctctaccaaaaatacaaaaattaggtgggcctggtggcacacacttgtagttccagctactcaggagactgaggcaggagaatcacctgaacccgagaggcggaggttgcagtgagctgagatcacaccactgcactccaacctgggcaatagactaagactttgtctcaaataaataaacaaataaataaaaataaaagtttatgttatagaacaacggtaaatagcacctcatggcctagttcttaacacagatggggcaaaatttctgaaaagtgaacagacaggtaacatctatcccactgatcacttctcccattaaatgtcaagtaaactttctaaattgcaaatctgaccatgtcactctgctattctaaaccctgctgccctctggaaaaagtttttttttaagcatacttaattcttattctgaagcacatttaaaagaaagagagaattgaaaatgaaaaattttgcttaattctcagtatactcagagctgcaaaaatctactggtttcttgggaagagcataaaatattcataaagcctataattatgtctttggtccctttatctaagagcttccttccgtggtaagcaaagcttacaggcattttcccacctagaatcgttttattgtaagcacccatctttgaattacgagtgataaatatgacatctcagaaatcaccagtaatatatttgaggtcaaccacctaaaggagccttcacctagaaattcccaaactaacagctctttatgacgtatagagcctatctataatttcccattcaagcttgtgttcggattgggccaaatatctgcaccacttgtagctagatgtggccatgcaaccaaggtctggccaataggatgaaagcacatgtatggagtgtggactaagagaagccttaaagggaatattgggggtggaatctttctttgcctcacctctcttcctcttagctagaaggcagaaatgctgcctgaattcagccagctctctagacagtgaggtagaagccacctggtgaagaattcagaataacaagacagaaggagcctaggtcctgtgttcattagctccagctgccataacaaaatcacacagactgagtggcttaaacaacaaaaatgtattttcttacagttctggaggctgcaagtccaaaatcatggtgctggcaaattctgttcctggtgaggactctcttcctggcttgcagatggccaccttcttgctgtgtcctcacatggcagaggtggtggggtaggggaagagacctgaactggtgtcccttttcttatgaagataccggttatattgacttaaaagcccacccttatgaagcttatataatcttaattacctctctaaaagcactgtctccaaatacagtcacattgggggttagagcttcaatgtaaattttggtcaaggagcaccattgaggtcatagcagcctctaacagcatagaaccctgaattagactaagatttctgctacacaagagcaagggatgattaaatcccattcagtaattaggatcacctctcaccgactcacattcacacacactctaagacacacaactcccagccacatgccgagcatggtaaccccatttcctactttaacctttgggggagcctgggaggtgggaatcattcttatcccctgtccaaagtggagaaatggaggtcctgaaagagcaactctcttggcagggttggagagtgagtctgtgctgtcaaatgcctcatgtgtgcatttctgacaagatacagagtaatctgagggtggaggaggcgtgaaggtgaatggcaacctagacaaagaactgggaagagatcgacggaaatctgttcctaaaagccccatgcgtatgtttattgcagcactattcacaacagcaaagacatggaatccatgtaaatgcccatcaatggtagactagataaagaaaatgtggtacctatataacatggaatactacacagccacaaaaaagaaggaaaacatgtcctttgctgtaacatgaagggagctggaggccattatccttagcaaattaatgtaggaacagaaagtcaaatactgcaggttctcacttattagggggagctaaacaacaagaacccatagatcccaggaggggcagacctgagggtggagggtgggaggagggagaggatcagaaaagatacctatcaggtactaggcttactacccgggtgacaaagttatctgtacaccgaacccctgagacacgcactttacctatataacaaacctccgcatgtatccctgaacctaaaataaattaaaaaaaaaaaaaaagaaagaaagaaaagaaaaagacccacaagccattcttgctgctggagtcttctggagtttgggttgttgttgttgttgttgttgtcgtattttgttaaaacattcctgttcttctgaaaggatacctggaggctttatctggattcctagggtcctctatccacaaaaagtcagtaaagccacgtctctaattttgggaaaatgtgggtgtgtgtcctaagaccctcatggtgggtggaataatttgctatagggcaagttggagagtgaccaaggatgcctcaaataatgtctcccttttcattacgggggagtgcctttcagaattacacagcaagggtgaattatacgttgactcgtcatctgtgacaaatttcatgcagctcaaggctatcaacagcagctcccttgccaacagcttgcagcagctgccgctgatcaaggcagtcagctcgatccccgtagccttccgtgaaggaccacgggctggtcagaagcagtctgacaggtcacagagccagcccagctgttggggggattagctgtaaggaaagctgatcctatgacacatgctttaggtatgtccgcccctgggaaacgtgaccttcaaggtttgcgttatagaactttattcgcttcaaaagatggagaacacttttgttttctgagtccctggagaatcatgatgcagacagctttggaggtacccaaagaaatggaacacagaatcccaattacatataggccgcacacatgataaacaactgctggtttgggaattgctgggcgaagcttcctttcggcagtttgctcagaatatattgctgatgatttctgagatgctcaattcatcattcacaattgctttgcagtaaaatgcttgcagaagggaaaatagctgtgaacgctgctccccaaggaggaaagcctataactgctggagccaaagatgtcatcgcaggttttatcagtatttcattttcttcccatgaaaccgataagcattcgaagccctgagtgtggtgagaattaagcaagatttgcctctttctgattctttccacaaggtagtgggaatttgaaatgggagaatgatgttgtcctatctgttgtgtggaaagattaccttggctttgcttgtgagaagggatggacgggggggcagtatcatggaaaaagtttgagaatatacaaaggtaggcaaaatagcataagaaatcccttctactcattgtctgcagtcatcagctcatggcccaacctgttgtgtctatacccccatcacatcactggcattgtttgtaaagcaaatcccagacatgataccatgtcctccataaacatttccatatctgtgttttgtaaagactcttgcagaaagctgacttctgaaccaaagccccatgcatatgtgcccttggaaggtcactacctgatactgtctattgctggaaaaagagcagcttgcataagcatttttacccacaaaactgaagctatagaatacactagggaaatgcagctcattgcttgggagttatgcattagatatgctatgatctggttctacaggcatttattgattattgactctttgctaggaactgttttgggcattaggacatggtccttgcccctgagatactcaccatctaatggaagacacagaccaaaaaacaagtaatatagtcaatgtcatgtgtggtatgtaatagcaaaatgtatcccgtactgaatgctccagactggtggaaaaatcataataaaataagaagcaagaacggcagcagaatagctggggtttactgagaacttactgtttcgagcacccaagatacaaagcaacacgttagagaagatggtcattgtttggaaattagagaaaagctgctggaaaagaggatttagagatatagtttggaggaccacaaccagcttgcacatgtttttatggtttagaaatggcaactccagaatttttttttttttttttgacagagtctagctctgtcgcccaggttggagtgcagtggcgtgatcttggctcactgcaacttctgcctcccaagttcgagcgattctcctacctcagtctcccgagtagctgggactacaggcacatgccgccatacctggctaaatttctttctatttttagtagagatgggatttcaccatgttggtcaggctggtctcaaactcctgacctcaggtgatccacccacctcggcctcccaaagtgctgggattacaggcgtgtgtcaccgtatccagcccagaattctgaccgcgtggttctcagtccaaaaacattgtcccccttcctgagtcagatggcaacacaaaaatgccttgggaaccagctgggccatttcatgcagcagtaattctctggatcagtctcctcgtgtgactgatcctggttttaagaaacttgcttctatttcctggtcagaaaagtctctccctcctgcctcatcttttctacccctgtttagacaccactcctagttcaaagcaccattgcctcctgcctggatggttgtagtggtcactcacctggtttcctttcttctactattgctctaccatcatcagctctccttagaaatcagaggatcagtggggtgtggtggctcatgcctgtaatctcagcactttgggaggccaagacaggaggatcgcttgagcccaagagtagttcaagaccagcctgggcaacatagtaagaccctatatcttaacaaaaatatatattttgtatgtatatctttttatatatatatttgtatatatatttatagatgcatctttatatatatttatagatgcatctttatatatatttatagatgtctttatatatatttatagatgcatctttatatatatttatagatgcctttatatatatttatagatgcgtctttatatatatttatagatgtctttatatatatttatagatgtgtctttatatatatttatagatgtctttatatatatttatagatgtctttatatatttatagatgcatctttatatatttatagatgtctatatatttatagatgcatctttatatatttatagatgtctttatatatttatagatgcatctttatatatatttatagatgtttttatatatatttatagatgtctttatgtatatttatagatgtctttatatatatttatagatgtctttatatatatttatagatgcatctttatatatatttatagatgtctttatatatatttatagatgtctttatatatatttacagatgtctttatatatatttacagatgtctttatatatatttatagatgtctttatatatatttatagatgtctttatatatttatagatgcatctttatatatttatagatgtctttatatatttatagatgcatctttatatatatttatagattttttatatatatttatagatgtctttatgtatatttatagatgtctttatatatatttatagatgtctttatatatatttatagatgcatctttatatatatttatagatgtctttatatatatttatagatgtctttatatatatttactgatgtctttatatatatttacagatgtctttatatatatttatagatgtctttatatatatttatagatgcatctttatatatatttataggtgtgtctaaaatatatatatgttttatacatgtataaaagaaaccagaggatccaaaaaaatagagcctgagggtggaaaaaagaaatcagagaagccatgaagaagaaaataagccagacagaatggcgtgcacctgtggtcccagctacccaggaggatcccttgagcctaggagtttgagtccagcctgggcaacatagcaagtgtccgtctctaaaacaattatataaataaataaaatttaaaaaataaattttaaaaagaaaatataatttcatccgtctttcttacacacacacaacttttaaaaaaactttcatggcttcagatcatgcacacagtaacacttgggcttcttaccagagtctgcaagaactgtgatattccagccccaaaaacccctctgctcccgccgcccagcctccatccaggtccctgaggaagccagtatcccccatggctcctcacctcggcacacggcattcccacctctttccctcgtgccactggccccaccaccctcccctgctccagtctggttcctattctccttctttctgttgccacatcaggtgtcactaccttcgtagagccctcaattcacccacaggacagctccctcttacctgcttctctcacacccctcctgtagattttaacgctgggcacactttactttaccctcttttgtccactctaagatccacctcctcctgtccccactctctcacatctctgaaatcaggctgtgtcctacatgggtggcagtcatgcttaagttgtgggcatttttctgtttcctgtgggtatataaagtaacagtacatcttacaatccataccaccatcttggagtctacagaaagcaccatgtgtttgcacaaagtctgttttccttgcacagagctggaggatgagtcccatggctagtcccggggccaagcacagctcctggtacaaagtgaggctctgcccagaacagggccagacacacccttgatgcatcaggtcagattcaagaaccaggtggttccaaacagcagagatcgttttgaagggtaaagagataatgcatttgtgttacaagttaataaatgatattacagtcattcgtgggcaaagcaaggcaaaggggccagaggacttagttatcatggtccacagagaccttggaagagaaaacatttgaattgaagcctgaatgggagaaggaaggagccatgcagagagctctctggcagaggagacgtctcaatagagggtttccagatggagggattctcagccttggcactcttcacatctggggccatgacagctacgtgagtgcatgcggtggtcccagctacctgtcccactgcactccagccaggatgaaagcacaccctccctgaccaccctcaagtgatctggcacctgataagctctgacgtggcctcctgtcccatccttcctttctctctctctctctaatttttttctttttgagatggagtcttgaaagaaggaaggaaggaaggaaaagggaagagagaaagaaagaaaaagaaagagagagtaagaaagaaagaaagaaaaaagagagagaaagagagagacagaaaagaaagagaaagagagagagagggagggagggaaagaaagaaagagagagatgaaagaaagaaagaaaagaaaagaaagagagaaagaaagaaaagaaaagaaagaaagagaggagggaaggaaggttcttaggatgctataggtcaaggtttcaacctcggaactattgacatttggggttggaccagtccttgtggggccgtcccatggcttgcagggtgtttagcaacattcctggcctccacccactagacgtcagtagcactcccctctccagtggcagcaaccacaaatgtcttcaaacatttctaagtgtcccttgggaaaggcaaaatcaccctggttgagaaccactgctgtggaagacttcaaccatgatgaacattaagccccatcactccgttcaaaccaaaaagtgataaagtctagagtttactagaggtcagtggtatgccaggaaccatgcttcgcttgggatgcaccctttaaccatccagcaaccccaccaggtagagcatggcatctccctgtgttacactggagaaaactagagactctgagggtttagtcaccttgctgtaggtcatgtgtagcaggggcagaccttgcatcccaacaggaggttctgctggctctgggacctgggctctgccctgtaccgtctccctgcttacagactcaaaagcagtatctcctaacatctcagcctctgcacgtgccattctccaggcttacatacagctctgctaactccccttctttctttattgagttccaggacactctaaagaggtcacttcctgctgggcacagtggctcatgcctgtaatcccagagtcttggaaagctgagacgagaagataacttgagtccataaattcaagatcagcctgggcaacatagtgagacagaccctgtctctacaaaaaattttaaatattagttgggccatggtggcacacacctgtaatggcagctactcaggaggctgacgtggggggatcacttgagcccaaaagtttaaggttgcagtgaaccctgattatggcactgcactccagcctgggcaacagagagacagagtgcctctattttttttaaagaggccacttgctatcagaagagtttcctgagcatcccccgcaacctcaccctactcccatttttgctatctccatgggccctacttctcctctcttagctccaattatgctataatgcagcacatgcatttttgctgatctgctgacttgcctcattggtgtgaagcaacagctgggacagcaactgctccacattcccccggatcctccttcaacttctcccactcctgggccaaaggtgtgcatttagctccatagcaaagtgtcatggcttctgcagaacactctggtcaccaaggcgagaggcaacacaggtggacacgggtttcagtccatctttgtggggctcctgcttgtccttgctctacctggctctacatctatcttctcttcttgacttcctgtcctgtggacttcaagcaccaacatcagaaacaaataaatttccttgcagaatcttcttaaccagctgcacaactgcttaagatcaaattctagagttcctgcctctctgcttgagcactgacatactttggtatcagactatatagttattgcctgcttgctttcctgtcttctcccaacctactcctccaaacctaggaattgctcccccgtttcctagaacctgccactccctctctgaaattctgagctccgaagggcaggaaccccaccttattcagttaaaactgctttcatctgaaaaaaggtcatctaagttttcttcccactgattcatcttagtaagatggtcaaatgtcttagcagtggagtaaagactttggaatctgaagtaaaacagacctagacttagttctttgtttcttcccttttcaagctatctaaccaagggctgagccttagtgccgtcaagagtaaactgggagaagaagattactacatgcagtggtgttgtggagaagaactgagagaagccatgcaaacgcttcagcacaatatctggtatcagtaggtgctaaatcttggctctcagctgtcatgattttgagtttggctgcagaattcagctcagagggaggcccacacgatttcgatttgccccagattcaaattccaaatgcacagagctctactgatccaatgagaagaaagtcattcggtgcagtgattcccaaattcttccttgatgttcagctattccttccttcagcactcggtgaccatcttctgtgtgccagaggtctgtaatttttgtctttgttgttgttttgttttgttttcaagatggagtctcgctctgttgcccaggctggagtgcagtggcgcaatctcggctcactgcaagctctgcctcccaggttcaagcgattctcgtgcctcagcctcccgagtagctgggattacaggcatgcgccaccacacctggctaatttttgtgtttttagtagagacgaggtttcatcacattgtccaggctggtcttgaactcctgacctcaggagatctgctggcatctgcctcccaaagtgctaggattacaggcatgaggagccactgtgcccagcctgaggtctataattttgaatccacacgtcatgtggctgccacgtctggaaaatcccatctccagggctctccttgactccatactcagtcccatcctttccattcaccagcctgagcctgcccctgttccccaggcaaatgggagctctcctggaggcaggtcagtgattccgaaatgacttcaatgggagagatggaggacagtgcaaggggtgcaaccacaggcttttgcatattcatcatgttgggttgctacaggagcatgcacatttggctgtgtaaacctcgatagaccttattagaaattacaatgttcctgcaaaccctagtgatataaaaaaactcttcccccaagtcaacttttttttttttttttttgagacggagtctctctctgtcacccaggctgaagtgcagtggcgtgatctcggctcactgcaagctttgcctcccaggttcacgccattctcctgcctcagcctccccagtatctgggattacaggcgcctgccaccatgcccggctaattgttttttttgtatgtttagtagagacggggtttcactatggtctcgatctcctgacctcatgatccgcccgcctcggcctcccaaagtgctgggattacatgcatgagccactgcgcctgactgagtcaacttttattttaaaaatactaacccactctctcctccagtcacataagatgcaaaaaaaaaaaaaaaaaaatgccaaggagaagaaggtggccccagtccctgctgtcatgaagaagcaggagaccatgaaactggtgaatcctctgtttgagaaaaggcctaagataagaatcttggcactggacaggacatccaacccaaaacggacctcacgcgctttgtcaaacagtctcacgttgcagtggcaaagaaccattctttccgtgagtggctgaaagtgcctcctgcaatcagccagttcacccaggcctcagactctcacgcagccacccaactgcttaagctggcccagtacacaccagaggtaaagcagaaggagaagcagagactgttgtcctgggctaagaagaaagctgtcagcaaagggaacacccctacgaagagaccacccatccttcaagcagggttaacactgccaccaccatgttcacacacagcaagaaggctcagctgatggtgactgcgtgtgacatggatcccagcaagctgtctgtcttcctgcctgccctggattgtaagatgggagttcctgactgcattaatgaggggaaggcaagactggggtactgagtccacaggaagaccagcaccactgttaccttcacgccagttaacttgggagacaaaggagctttggctaagctggtggaagctaccaggaccaattaaattaacagatatgatgagatctgtagtcactggggaggcaacatcctgggtccaaaatccctggcttgcattgccaaagctggaaaaggcaaagactaaagaacttgccaccaaactgggttaaatctacactgctgagttttctgtacataaaaataattaaaaattctcctttaaaaatatcaagtagctgcttctttagagctaggcaccggattacccactgggaatacaattgcgagcaattctcttaaaaaaaaaatagatatggccaggtacagtggctcacgcctgtaatcccaacagtttgggaggctgaggcaggtggataacctgaggtcaggagttcgagaccaacctggccaacatggtgaaaccccgtctctactaaaaatacaaaaaattagccaggtgtggtggcacatgcctgtaatctcagctacttgggaggctgaggcaggagaatcacttcaacccaggaggtggaggttgcagtgagccaagattgcaccattgcactccagcctgggcaacaagagtgaaactccgtctcaaaaaaaaaaaaagaatcagctcaaaagaatcctgatgtcaaagagacacatctggggacagcatattctggtcccctacacaggaaatgcacagatcttgaacacatcggcagaagcaggcttctcttgtctcctggtagcatcattacccccaactgtcttcacgctcattcaccaaaaattatttatttcatcaattcatcaatttttgcttgtcaaaaattggatatgatattggcatgcatctatggggtactgattaataataataatagagttttttttttaaaaaaaaggaaggccaggcaaggtggttcacgcctgtaattgcagcactttgggaggccggggtaggcagatcacctgaggtcaggagttcgagaccaacctggccaacatggtgaaaccccgtctctactaaaaatacaaaaattagccaggtgtggtggcgcatgcctgtaatcccaggtacttgggaggctgaggcaggagaatcacttcaacccgggaggtggaggttgcagtgagcacagattgcaccattgcacaccagcctgggcaacaagagcgaaactcagtctcaaataataatgataataataaataaaagatggaatactacacagctacagaaaaggaacacaggagtgcttaagttccaaaatggcatgatctctaaaatatatttttgtgaaaaaacaagatacaaaacaatggatttaatgtgccaaattttataccacaggggagaaatgtataagcacacctcctgtgtgtccacagacacctctgttttcttgcttgtatcattggttgcctccagggaaggaaaccaggtgcccacaaaactgagaagagagtcttcacgaaatctctttctaaaccttttaaatgtatcacctattcagaaaatgaatggaattgaatttacaataaaaatagcactaaaatataaaataaagtggaaggatctgttgtccagagagatagagacagggagagggagtgaggcctgtgccaggctgtagatgcagttgttgtgattgagttttctggcgccaggctcgtgggctgaagccccagctccacaagttactagctgtgtgctctcaggcaagttacttaacctctctgggcccgggccacctctgtaaattaagcatcataaaattacccccttcatgtggttgttaggcaaattaatgaatatggtaaaatgcttgaatacagggtctggcccagagtaggttgtgtaatcatttctacagctacttttctccatcccgggctgctaatgacatctgtatgattagcagtactctgcgctgagccctgaggatgctggggaggtagtgatgcccaaggaggaactctccaccccatagcataggaatggccatacatcctagtagggtgaggactccaggctgggccactgcagagaaaggcgccagccccagttaggaagacgtctacacgatgtgttgcctgagaagagtacaccagcctctctatgccgaagcctggttctactccatcctggctactggacctcagataagaagtcattgaactgccctgtgcctcggtttccccatctggaacaacagtatattgatagtgtcaacctcggagagctgttgtaaagatcaagtgagatgatcctatgaaactctcagcacaggcagctattattattattgctgctgttgttgttgttaaggagcgaggctctgaggagtgggtaaggataaggtgggtacagataagcatgggatggtgcacgcgagaagcaaagtttagtgtttttggaaagcagaaaagggctcagcgagtcagtgtattaattttctagagctgccatcacaaagcgccacacaccaggtggcttctacaaccgaaatcaaatttctcatggtcctggcagctggaagtctgagatccacgcgtcagcaggattggcttctcctgaggcctctccccttggcttgcagacgccatctttaccctggatactcacgtggtcgtccctctgtgcgtgtctgtatcctaatctcttcctataaagacgtcaatcatattgcatgaggcctaccaccctaacaacctcattttacctgaattacctcttcaaggaccctatttcaaaatacagtcatattttgagggcctgggggcgaggacttcaatatatgcatcttggaggacacagcctcgcctgtaacagccccaagcccaggaggtgggctgggcagtggtaagaggaggctggagggtttggtaaaggctggatctgggggtctattttacaccacagtcagcagcctggcttccaccctgagtgcggtaggagcccccatgggtcacaggagggcagggtcacactctgtgtccaggcaggacggcaatggctccctgtgggcccaactggatgctagaggaggctgtgtggaaatccaggcaaaggctggagacacggctgggtcagtggggtagacaggtctgggtggaagagagtttgcacccatgccatcaacgcatgagcatcttggcttccacctcccctactagcaacaaagctcgtaaatgagctcgcacccctgcctctcccctccgctccccttctccatgggaggaaaagggactgggtctaatgccgtttctttctcaagctctgcctgtgatttctttcctgttgtagattttagactaactctgtggcgccctctactgaccaggtgcgtctcgcccagagcgctgtccagccccttgaggtccagtcccgcggtctgaggccaccgtgactacagacgcttgaagaggagctaggggaattgaggtgggctcaaaggaaaagcacacgccggatctcagagactttgttaccaaaaagcactggaaaatatctcgttaacagtgttgtgcaatggctgcatgttgattacatcatcgtattttgaatatattgggctaaataagatacagtctttttttttttttagtcggagtcttgctctgtccccccaggctgaactgcagtggtgcgatctcggctcactgcagcctcctcctccctggttccagcgattctcctgcctcagcctcccgaggagctgggattacaggtgcacgccaccacgcgcagctaatttttgtatttttagtagagacaggatttcaccatgttggccaggctggtctcgagctcctgacctcaagttgatccacccgcctcagcctcccaaagtgctgggattacaggcatgagccaccacgcctggccaagatacagtcttcaaattatttttacctgttcttttttactttattaacataggtaccagaaaactttaaatgatatttgtgactcatataatatttctttatttccccctgctttagactattataaatgtaatgtatacataccagggattcgcaaattcggcactattggcatttggggctggataactcttggtgatggctctgtgctgtgcatttgtgggatgttgagcagcaaccctggcttctacctatgaaacgtgagtgtccctgcctctcacccaattgtgacaaccaaaaatgcctccaggcattgccaaatgtcccctggggcacaaaatcactcccaatctagaatcattgaaatatatatgtatatgaaaaagagacattgatgaaatgaaaaaccatgaactctaaggacttttgactcttacagagcaccatcctgtgtgagctccgtgttgcatgcccacctgtgtttccctctcagtcctcataatgaccctacagggtggacattatcattatgccctttttgcagatgaggaaactgaggcactgggtggttaagtgactggccctgaggtgcactgctaatgggtggcccagcccagacccaaatccaggccacgtccccggtgtaagagaggcgagcgtgtgcctggcacctgcagacccacggtgagaacccagatctccactgagtgccccatccctgacgtggaacctgagtcctccctttggggaggaaggtgaagaagtgggtaggagtcacgattaactttacctcccttggtggccaaaagaaaccagaaaataagctccattccaaccccttcctgtggaattatgatagagcaggaaagcatagcagagcacggtggctcacacctgtcatcccagcactttgggaggctgaggagggtggatcacttgaggtcaggagttcgagacctgacctggccaacacagtgaaaccccatctctactaaaaatacaaaaattagccaggcgtggtggtgtgcacctgtaatcccagctacaagcaggagaataccttgaacacgggaggcagaggctgtagtgagccgagattgagacactgcactccagcctgggagacagagcaagactccatctcaaaaaaaaaaaaaaaaagaacaggaaagcaggaatccattcattcattcattgcagtcaggtcgtgtgtatggaggccctgctgtatgccaaagtctattgaaggcagtgagagtgcagccatgaagaaaacaacacagctctgctcaggaaactcaccgacactgaacaaggatggggaatcacagaaaaaggaatttaaaattaattaattaattaaaaaaaggatttcaggcctagacaagttatttggagaaaataagacagagaaatgactagcatgaggacagacgtgaaagactccagaaacatttttctaaggtgtctcccgggagtcacatgtttaatccgcattgcgggtgattctgcagtgagggagggggcttagggcatccttggcaaaccctgccttggacccagcctgggttagcccccctaggcccatggggggttcagggtggaggagaagcagcctccacccagaccctcttctgtgtacccaacccccaagtctttagggagtccccgcggtgaggccaggctgggatctgaacccgcaggcatgcacaggctaagccctgagcctagaaaattccaggccccgcatccctccagcattggcacagcccctcctcttctccgcggtttccatggcaacagctgtcgccaggtgagatctctcaggggactgagcctcccaggagccaggtggggatggggagggctgggcgcattcatagtccactcttgactttgatgcagttaaacgcatcctcagacaggggtctttgcagaacagggcagaaaaacaggcctgtgcgggtctctgcagcctctggtagaaatcccagatcgccagaaatgactagtgacagaaatgatatctgtccgccctttcactccttcattcattaaaccacttaatttttgcataaagatcaattcgatcagtatagatgattaatatgagagttttatgaatctattaatgctgtatctatttcgagctgctggcattgttctagggagacagtattgatgaagaaaatacctgcagtgcttccttaacagggttggcttagatggggctgccgcacaaaacaccgcggaccccgatatgtaatatgatggcaggctttgaaaagttctgtggagacgagtaaagcagcccgtgttgtttgggatttaatttccttcattgtgaagtggtgatacattcgcagagtcaaaatgacattttaagatgtgattttaactctgcgactggaataatttctggggaaacattgtgtaatgaaaattaaacctcatgccctcatcccaaggcacccgacacccctcccggaagccacgtctgttccacgttccacattccttcttgaataattctgagcacaccgtattgtcagctgccctccccaccattttatttatttttattttttaatttttttttttttgagagttttgctcttgtcatccaggctggagtgcaatggtgcaatcttggctcactgcaacctctacctcccaggttcaagcgattctcctgcctcagcctcctgagtagctgggactagaggcacctgccaccatgcccagaaaatttttgtatttttagtagagacggggtttcactatgttggccaggctggtctcaaactcctgacctcaggtgatccgcctgcctgggcctcccaaaatgccgagattacaggtatgagccaccacgcccgaccagtctgtgtatttgtttgtttgtttgtttattgagacagagtttcactcttgttgcccaggctggagtgcaatggcacgatcttggctcaccgctgcctcccaggtacaagcaattctcctgcctcagcctcccaagtagatgggactagaggcacctgccaccacacccagaaaatttttgtatttttagtagagacggggtttcaccatgttggccaggatggtctcgaactcctgacctcacatgatccgcctgcctcggcctcccaaagtgctgggattacaggcataagccaccgcgcccggccggcatactcacttttcatatacaattagagcatcccattgtgtcattgtcctataactcatttaacctatctcctcctcatggatgttcagattgtgttcaatctttcatcataacaaatgctaatgctgctgcagtggattaccacagaagcatgttccttcacacatgcgtaagtaaatccgtacaatatatttctagaagtggaatttctcagtaagaaagtacaggcatccacattttgctaaagtgcccaccataaaggttgttccacgttgcacgtccaccaataacatatgaaaattcaagcgccattgaaacccataaaatatggattttcccttgaaaaattagaagagctaacaacactgggtttgatttcagcttgggaacaattgggtggtgtctggtggtactgcccacttcagcaaaacacactctctcccttttttccacactccccacccctccctattacttcccaatgcccccactctgtatcagtgtctgattaggatcatgcttgaggtgaccattgccatttcataggtgacgttactttacaaccttgagaatattgaggccaaaagagtcacttatttgaagaaaatgccagaccctttccaaccaaaatggttgtgccattttatactcccaccaacactgtgtgctccttccagccaccccacatcctcaccaacatttgatgttgctaatctcttcatttttaccgttctggtgagtgtgtcgtggcagaatcacttattttaagaaaaataaagggccaggtgaggtggctcacgcctgtaatcccagcactttgggaggccagggcaggtggatcacttgacgtcaggagttcaagaccagcctggccaacatgatgaaaccccgtctctactaaaagtacaaaaattagccgggggtggtggcaggtgcctgtaatctactcaggagtctgaggcaggagaatcacttgaactagggaggcggagcctgcagtgagctgagatcgtgccaccgcactccaacctgggtgacagagcgagaccctgtgtcaaaaaaaaaaaaaaaacaacttgcatttggcccgggcgcggtggcccacgcctgtaatcccagcactttgggaggcagaggcgggcggatcatgaggtcaggagatcgagaccatcctgactcacccagtgaaacctcgtctctactataaatacaaaaaattagccgggcttggtggcgagcgcctgtagtcccagctactggggaggctgaggcaggagaattgcttgaacccaggaggcggaggttgcagtgagctgagatcgcgccactgcactccagcctgggcgacagaacgagactttgtctcaaaaaaaaaaaaagaaagaaagaaagaaaaagaaaagaaaaaaaagaaaaatgagccaaggaggggaggctgtatctttatggaaatggagacattccacattgttgaatacacacaagccccgcccactctctccccctgcaggacctccccagcctctggggtggaagtctttgccttgggcttcagaaatgtctgagaacacgggagtgagctcttcatccaggtaagtcatgtccccacgggttgctcctcccactttactgttcccttcccttgattctgggtctagacagagacattctcttactacctggggaggttggggcagaggtgggtcctttaccttccagagtctggagagtaaccaggatttgcttttttttttttttttttttgtcggagtcttgctcagtcacccaggctggagtgccataatagctcactgcagccttcaactcctgtgctccagcaatcttcccacctcagcatcccgagtagctgggactacaggcacgtgccactacacccggcaaatttttttttttttttttagatggagtctcactctgtcacccaggctggaatgcagtggcacaatctcggctcactgcaacctctccctcctgggttcaagcgattctcctgcctcagtctcccaagtagctgggactacaggcatgtacagctacgcccggctaatttttttttctctttctttcgtagagacaaggtcttcatatgttgcccaggctggtctcaaactcctgagctcaagtgatcctcccatctctgcctcccaaagtgctggaatgacaggcatgagtcacctcactcatttttgcattttcaatcatccatctccctaatcctccccatttgatgcaagtgaagttggggacacattgaaaaaaaaatcctggctatgctgtggcaggcatagtgcccagtgattcacaagcagcttcccactgtcatcctcaccacaacctacagattcaaaaaaaaaaatgtttacccagttttagatgagaaaacaggctcagaaaagtgaagtcactttcccatgattccgtactttattttgttttgttttgttttactttattttttgagacagagtctcactctgttgcccagcctggagtgcagtggcacaatcttggctcactgcaacctccacctcccaggttcaagcaattctcctgcctcagcctcccaagtagctggaattacaggcaccctccaccacaccccgctaatttctgtatttttagtagagacagggtttcaccatgttggccaggccggtcttgaactcccgacctcagatgatcctcctgcctcggcctcccaacgtgctgagattacaggcatgacccgccatgcccagctgtattttcattcacgctcctaacacacacacacacacacacacacacacacacacaaatcattataggcactcattcatatggcagctcaggattctaacccacacacagcctggaaagttccatcctctgagtgcctctcagcctcctccccatctcctcgatgcagtttccatagcaacaggcagagcctgcctgcatcccagacccccagcgaaggctgctaaggaccagggcagggcgatgggggagaagccgagcagggggagggagcaggcctactgtaccccatcggagattcaggttgggcatattaaaacttaaaatgtgcacatttaaaatgatgtccttgacgaagggcaaaacccagccatgtgtgctttgccaacaggcgtggaaatcacaggtttctgttccgtggcagccgccagcaccgatgatacaaacagcctttgttgtctaaagattagtcatttgattgactgattataccaacaaatatttgttgattgcctactgtttgccagaccttgtgcgaggcggcagcatccaacacagatgtagtctttgttctcattggagttgacaacttattgagacagataataaatagatattgaagtggatatagctatagagctagggctggagactgaggaaagaaaagaacttctgtctgaggaatgtgagggctttcaaatgatcggggccggagaagcattaaaatgacgcagcagtcacaccctactcccagctttcagaatctcttgaaactgcttgctattgccataagtagctgcaaattaaacagtccccagtgggacactaaaacccataccctatagcttaacaattgtcagcagtaaaaaccagattctgccaaatatttaaagaggtttattgtgaaccaggatgagtgaccgaagcctggggttacacagtctccagaggtcctgaggaggtgcgcctgaggtggtcatgttccggtttggttgcacacatttcgaggagacaggaattgcaggtaaaatcataaatcaatacactgagggtatacatgagctcggcctgaacccgtggacatcttgaagtcaggggcttacaagtcatagtaggttttaaagattcttttttctcactccttcctgcatactgaaaacgtttcttgaggtgtgtgtgtgtgtgtgtgtgtgtgtgtgtgtgtgtgtgtgtgtgttttgacacagttctcactctgttgtgcagtggcatgaccatggctcactgcagccttgacctctcaggctcaactgatcctcccggctcagcctcccaagtagctgggaccacagatatgcaccaccacccccgcctaattttattttactttttgtagagacgggttctcgttgtgttgcccaggctggtctcaaacttctgggctcaagcaatctgcctgcctcagcttcccaaagtggtgggattataagtgtgagccactgagtccagccttaaggattctttagttggcaatttgaaagagttacactttgtttaaagcaactcagtagaaagaaatgctgaagttaagggggtctggtctccatcacacgatgctataccagagatgggttggaagtcagccacctgatactgcgttaataaaagaacctgcttaacaagattttatggtttgtagagtgtgactacctgggccacctagataggaatttaggtaagagagaaaaaggtcgcagagtcctcacaatgcacacctaatcactaaccaatgttatttctgtaaattgtaaacaaaaaaataaaattctaagccccccaacctactgatggaccctcccctcagccaggggcattccaaagttaacctgaggctgggtgcagtggctcatgcctgtaatcccagcactttgggaggccaaggcaggaggatcacctgaggtcaggagttcaagaccaacctggccaacatggtgaaaccctgtctctactaaaaatacaaaaattagctgggcatggtggcacacacctgtaatcccagctactcgggaggctgaggcaggagaattgcttgaacccaggaggcaaaggctgcagtgagctgagatcgcgccattgcactccagcctgagtgacagagtgagacgccatctcaaaaaaaaaaatccacttgtggctgggtgcggtggctcatacctgtcatcccagcactttgggaggtcgaggcgggtggatcatttgaggtcaggagttccagaccagcctgaccaatatggtaaaaccccatctctactaaaaacacaaaaattagccagcatggcagcatgcacctgtagtcccacctacttggggggctgagacaggagaattcctcgaagctggaagacagaggttacagtgagccgaggcaacagggcaagacaccatctcaaaatacataaataaataataaaaataaataaaaattaaaattcacttgtaactgctgctaatcagagtgtgaatcaggggaagtcaaatctgtgctcttgggttgtaatcctcaagcttggcccaaataaactcttaaattagttttgcctcagcttcttccttttaggttgaaaggatagagacacacacatatatgcatacgtattttaccataatctatatgtacataggtagcaccatatagaacaaaattttttgtagttttgtcttttgacattggaaagcacagctctaaaaactactaagaaaaaatatatcaggataaaaataaaaagagcagcagattgtgacggtgaatgaatactttgcacaaaatattttgtttcaggacgtccaggtcgtagccaggaattgacatttcgacaagcccctacctgaaccaggtgaccaccttggtagcagaccccaggcaggcaggcaggcagggagtcctcagatcctcccaacagccctgctagctaaggatggtgatcacacctgctgcagaagagtggaccgaggcttcagaggggaaagcagtgaccaaagatcagattgtgcctctccatctcttcccaaataataaatacaggtatttattgtacccctgctctgtgcccacacggggcttttacatccacgcattctgtgctcaagggcatggaaaattccagcctgaaagccttgcttgccccatcctgtcccccacactgcagtggtttccatagcaacagtcttggtcgcaaacatcccttgagtcccctgaaggggaggaggagtggttgatgtcagaatagcctgggctgagggtggtgggacaaggggaaggattgaattctgcaattcccaccccaccccatattcctggttcactcaagcctttagggttcattcaaggtctccttgaatggggttttcgtagaagaacgaaaaaggacctgggcatgcaagtggctgctggctcaaaaaaaccaaacaaatagaaatcccaggttctccatggagcagctgccgcaggtgcctgtgacacccccagcatctatgcccacctttcagtcgcgcctcattcctcctccaacacaagttgacagagagcatattatgtgccagggataatgttaggcacttgagcataatttcaaaaacctgctatgatgaataaaaactggtctccaaaagcctcaagtgtctccccaaaaaaacacaaatgcatgaggtcctcttattctcatttcaaaagatgtggggaccctgttttctggcacgtgggaaccccaaacacctggaggaactaagaggaaatgaatgaaactcaagactcaaccatcacccaggacccaaattacattacttttgagctcagcagagtggggaaaggtggccagtggagaccgttaagggagacacattcagaaattaactgctgttgattgcaagatgctgcgatgattcaacccaactcaaaaatctcaggacatgtgcttcccagttgaacttttgatggttggagagattctcagtaattgtgtatggcagaaaaagaagcatatggtatatggaacacacagcactgaacatctgcttgagcaaatgtttgtttcttttttcttttccatgaaactgcataaactgtcaacgttttattctaatgattatgggccttttcatgggttatgtttttttcaaaagcatgcccatcctggctctaaaatatcacggtcctcaacagatggtggcagtttagaagggagcgtttgtgcaaaaggccatggagaataaacttaaggtgtttgtcttcagagagagaacacaggctgaagaattaaaagagaatgacaaaaacccacacagataggtgttctgaaatataggccaggtgcagtggctcacacctgtaatccatgcactttgggaggcccaggtgggtggatcacctgaggtcaggagttcgagactagactagtcaacatggtgaaaccctgtctctaacaaaaaatacaaaaaaaaaaaaaaattagccaggcgtggtcgtatgtgtctgtaatcccagctactcaggaggctgaggcaggagaatcacttgaacctgggaagtggaggtcgcagtgagccgagattgcaccactgcacaccagcctgggcagcagagcaagagaaagatcgtgccactgcactccagcctgagcgaaagaaagaaggaaggaaggagggaaggaaggaaggaaggaaggaaggaaggaaggaaggaaggaaggaaggaaggaaggaaggataaaagaaatatacagggtataggggagttagcaccagcctgggccacattatttattccttctggcatccctctgcctggtcacaagcaaacttaaaacattgccagctctgtgttttaataataccatgtcttgtaatagcaaatgactggggaaaaaacctcaatttccctccagagggggctggccaactaagttctgataaatgcattcgatggaatgttatgcaactgtgtaaaattctgaagaagttctttaggggctgaacaagcagaatatacagtgaaaggatatataataatgaaaagggttgctatgattgtgtaaaaggaggaaaagagaaataattacattgacttggtccagaaggaacctgaactgtaaatcacagttccatgaggcaagggggtcagattttgtagcccctaacatcaaacattggctgcccccaattgtggggagagatgaggtaacctcccgggtgtctgtggatgaggtggttccaggggcagctcttcagaggacaaggtcattagctgcgcctcacccacactgcctgcccaagtggggttggggcatccctgtgtatgtgctttcagaatttcaaacttccttccccatgaacggagtcctgtatttcatccgatggacgatgctgtccactgtggaggcaccattatttcctagccaggaagaacaataaagcatggtcaattaatgcaactgactgtaaaaggcagcccaattcctgagactgtgtaatgagtggaaaaaagtgagcaaagtggggaagaaagcaaaagcatcttaaagtgaaaaacatgcattagctgtcgtaaacaaacacacacaatgcccagggcactcctcccacagtggagcactcactaaatgaatgaatgacaggccctaccacaccccaacacacacacacaatctacccagtgtgggggggctcttccccagaactcctcccacagtggagcactcactaaatgaatgaatgacaggccctaccgcaccccaacacacacatacaatctacccagtgggtggtgcttactgctcagctgagtactgctaaaaattgccgacaagacttactctctgggtgatttgatgaaatccttgatgccagggggaccactgagtttaacgggcgtctaatctcctcacacacccccatccatgtcaaatgggaggccaggcagggcacagtggctcatgcctataatcccagcactttaggaggctgaggcaggaggatcacttgaggcctcaagtgaccaggagttcgagaccagcctgggcaacacagcaagaccccacctccacaaataattttaaaaattagccaggcatggtggtgcctgcctgtggttctagctacttgggaagctgaagtgggaggatcgcttgagcccagaagttggaggctgcagtgagctaggatggagccactgcattccggccagggtgacatggtgaaaccctgtctcaaataataataataaaatataaaagggaggccaacaggctctggcagagaccttctgggcaactccaccaagaaatcaagtccccatctccagaaaccccactttgaggtccagctcatggcttagctgcaggcgagataggatagacaaagagaccatgtgagtcagggtcctctggagacatagaagcaacgggacattcattcattcattcattcattcattctcaggaattggctcttgcgattacagaggctgagaaatccagacccaagagggccagtggtgtaaattccagtatgaatcttcatcccaaggcagaggcagtctgaggtcccaactcatgcagtcaggaagagaggaaggatcctttctcactcagctttttgttttatgcaggcttttgactgatgagacaaggcccacccacactgtgtagggccatctgttttagtcagggtatagatttgaatgccaaactcaaccagaaacatcctcacagacaccccagaaatgatgcctagccaatatctgggcaccctgtggtccagtcaagttgacacaataaattaaccatcacagatactttttcatacattttattattgtactaaatattcttttgataaatttggaatttagggtaggttgaagactgtgaggagggagtagagtggggaaaaggaggatttgaggtaagatatggttttgggggcaagatgatataaacttttattttgcaaaaatttcaaatttataaaagcaatttcaggaatgatgcaaataactcccatttaaccttcacccacattcaccaattgataacattttgccacattttctatctctctctcactctttttttttttttgagatggagtcttgctctgtctcccaggctggagtgcagtggtgagatcttggctcactgcaacctctgcctcccaggttcaagcaattctcctgcctcagcctccgagtaactgggataacaggcgtgcaccaccaagcccagctaatttttgtatttttagtagagatagggtttcaacgtgttggccaggctggtctcgaacccctgacctcatgtgatccgcccacctctgcctcccaaagtgctgggattataggcatgagccaccacacccgacctctctcactctttttctatctctttagtgtaagttgcagatatcatacccctctgctcctaaatttttccgtgtatattttctaagaataaaggcattcttttttcatagccacagtacaatgattacattgagaaaatttaatattggctgggtgtggtggctcacgcctgtaatcccagcactttgggaggctgaggaaggcagatcacaaggtcaggagattggctaacatggtgaaagcccatctctactaaaaatacaaaaaattagccaggcatggtggcaggcacctgtagtcccagctgctggggaggctgaggcaggacaatggcgtgaacacgggaggcggagcttgcagtgagccgagatggcgccactgcactccagcctgggcaacagagtgagactctgttatatattattatataataataataatattgaggcattatattcattttatgcatagcccatgttcacacacaaattattccaacaacttacttgatagcattttcccccaatcctggatcaaacccaccgcttgtttaaagtggtgtctggcactgtgaagttatttcccctcgggattaattgtctgtggaaactgctttgaggctatggacggctcctgcgtcttctcatgcttgtgcccacgaggcctaggatcctttgatggttcttagatgctttgatggtcctggatcagatccaggatgatgcattctgtttagccatcttgtctcttgagtctttctaaatctggatttgaaacctcagctgttcctcatcttcccgacactggcgtttttgaggaatacagagattccggagaaggtctccacaatccaggtcatttgtctgatgcttccctgttctttatttcagatttgcattttggttcaccagtgacttttttctttctcggcactatgttcaactcgtgatgacagttggttccaatggtggtgatgtcagctttgatctcttgttaaatgtggcgtctgccactgtgaggctcatttccccttgtaactagtcatctgtggggaactcccatgaaatgacaatgccctgcttctgctcatgctcatgtccacggggtctagggtctagggccctttaataattctctctctctccttttttttttttttttctggagacaaagtttctctctgtcacccaggctgggctgcaatggtgcgatcttggctcaacctccacctgcccggttcaagtgattctcgttcctcagctgcccaagtagctgagattacaagcacctgccaccatgcccagctaattttgtatttttagtagagacggggtttcaccatgttggctgggctgatctcaatctcttgaccttatgatccgtccacctcagcctcccaaagtgctgggattacaggcgtgatctctctctattttttaggagacaggtctcactctgtcacccaggctggaatgcagtgagttcgtgatcattgctcatcgtaacctcaaactcctgggctccagtgatcctcccaccttccctccctagtagctgggactacaggtgtgcaccaccacacccaagctattaaaaaaaattgtagagatggggtctcgctatgttgcccaggctggcctcaaactcctgggctcaagtaatcctcccatctcagcttcccaaagttttccaattacagtcatgagccactgtgccctgccctttaataattcttgcttgaaatagttaatactgtggtggttgctaggtgctaagtttctaactcaactcctccttctgtatttatttgttggaattcttagccagaatttagcttttgctgcccaggctggagtgcagtggtgcaatctccacccactacaatctccacctcccgagttcaagcgattctcctgccatagcctcccaagtagctgggattacaggcgtgagccaccatgcctgactaatttttgtatttttagtagagacggggtttcaccatgttggccaggctggtctcgatctcctgacctcaggtgatccgccctcctcagcctcccaaagtgctgggattacaggcgtgagccactgcgcccggcctgttggaattcttctgtgaggctctgcttccttttctcacacatttattgattcagtgttgattttagggattctgactttagtttatgggttataatttattacgagcagaatttattttcactgaaactgttctggttttgaagtgggaatcccttcaagctggctgctgtatcttttagacatttttttaaaagctcttcttactttcaggtacaataagacgttccagtctcctactgtcctttccctgcccagcccagcaatcagccacttctccaaggagccctggctcccctgagtggagaatcacatttagaaaccagcatctgagctctaagcgtgctgtctcataagctatgtttgggaaagtaggctttatcctgaagacagcaaagttttaactagaggagtgatataatcattatctgcatttttaaaaacttatttatttatttatttagagacggagtcgcccaggttggagtgcagtggcgcgatctcagctcactgcaacctccgcctcccaggttcaagcgattctcctgcctcagcctcctgagtagctgggattacaggcacccgccaccatgcccagctaattttgtgtatttttagtagaggtagggtttcaccatattggccaagctgatctcaaactcctgagctcaggtgatctgcccgccttggcctcccaaagtgctgggataacaggcgtgagccaccacgcctggtcattacctgcatttctaaaagatgactccagcagctaatgtggaaaatggattggagagcccagtgtttccagaaatacagcccttcaagatcagtcatttttcaacaacatggatgaccctggagaacattatgccaagtgagataagtcagtcacaggacaaataccacatgatctcccttctatgtggaatccaaaaggttgaacccatagcaacagagagtggaactgtggttacctgagactgggagatggggcgggttgaggagatgttggttaaagggtgcaaaatttcagttaggaggaataagttcaagaaatctattatacaacatggtgcctatagttaaaaacaatgttttgcattcttgaaaattactaagcgagtagatttttttttgttccctatatcttagtgctcagaagaaagcagattttaagtgttctcaccacacataagaaaatgacaagtacgtgcggtaatgcatacattaaatagcttgacatggtcatcccacaacgtccacatatatcaaaacataatggttgtaccccataaatatgcgcaatttttatttgtcaattaaaaataaataataaaaggaaattaaaattgtatttaaataaaattttattttattaaaaatatgaatatatggcacttcatgtcccatcttgacgaattttgccgtattggtgtctttactaggatattagacacaatattttttcctttaaaatcagtctctgtgatgaagggaatttaagaatcactatcatgaatggaaacactggtttcacttaccataagtggaaaataaaaatagacacaagagaaaaagctcacaaaaatgtgtgtgtgtgtatatatacacatttttaatatatatatacacattttatatatatatacacattatattagatatgtatatatatattagacagggtatcactccaatacccaggcaggagtgcagtggtaccatcatagctcactgcagcctcgacttcctgggatcaagcaatcctctcacctcagcttcccaaggagctgggaccacaggtgtgcaccaccacgctgggctgattcttttaaaattttttgtagagttaggctctcgctatgttgcccagactggtttcaaactcctgagctcatgcgatcctcccacctcagcctcccaaagtgctgggtttatagatatgaaccacctcacctagccaaaaatatcttttaatattgattatatactgctgccagccaaggttctgagcccaagacctcttttgattttgtggagttttttttaaattttgtttcattttgttttggttcacagaagatgttggcaataccgttaaagacgttcaaaccacaccaagacattatcctttatgaaacacaaaggttcaaaacatactgaaaaggggccgggcgcggtggctcatgactgtaatcccagcattttggaaggctgaggcaggcgggtcacctaaggtcaggagttggagatcagcctggccaacatggtgaaaccccgtctctaccaacaatacaaatattagccaggcgtggtggcgggcacttgtagtcccagctattcgggaggctgaggcaggagaattgcttaaacccgggaggcggaggtttcagtgagtggagattgtaccactacactccagcctgggtgacagagcgagactctgtctcaaaaaaagagaagagaggggagagggggaggggggaagggagagaagaggagaggagaggagaggagaggagaggagaggaggggaggggaggggaggagaggagaggagaggagaagagaagagaagagaagagaagagaagagaagagaagagaagagaagagaagagaagagaagagaagagaggaagaaactggaaagggtttctttgttcttttgtgatttgagcatgacttttttttttttttgagatggagttttgttcttgttgctcaggctagagtgcaatggtgcgacctctgctcaccacaacctccacctcctaggttcaagcaattcttctgcctcagcctcccgagtagctgggattacaggcatgcaccactaggctcagctcattttgtatttttagtagagacagtgtttctccgtgttggtcaggctggtctcaaattcccgacctcaggtgatccacccgcctcagcccccgaaagtattgggattacaggcatgagccaccacacccggcgattcaagcatgacttaacgccatctgtctggcatcttaatttaatcacttgagagcagccatggggataggtcacatcctggaaagaggtgcaaaggcaagttaataattcagtgagtcattcagtcccgaatgtgagcagagagagggggcaacgtggagggagctgcaggcagctcttgggaaggtgaagtccacaggacctgggatgggattggacgcttaggcgagcaggtgagcaggagggacttggacctgagtaacttggtaggtgagggtggcctttggaggcaggcagggcagggaatctgggtgggatcctgggaggtgtccatggtcatcctcggggtgcaatggtgggctggacccgggagaaggcaaatggtttggagaacaggctgaacaggttttttagtggaggaagacaatacgacttgggtagagcttgataaagacagaagggttagaagctcatttcttcgtgagcatgcgtgcagggaaaacaagccatgaggagttgacacaagtttcagtggctgctcagaacctctgccctccagaccccacggaatttccagagtggggcagtgcgtacatccctgtaatcgaggaaggccgcaggacagtggaggcgccatctccacacctaaaacacctaagtaatattggccagtttcacacattatcaaccctagtttttcttcttaacttgcttctccctaaactgaaaacagtgggggcagtgatttgcggggttttttgtttgttttgagacagagtctcactctgtcgcccaggctggagtgccgtggcgcaatctcggctcactgcaacctccatctcccaggttcaagcgattctcctgcctcagcctcctgagtaactgagaccacaggcacctgccaccacagccggctaatttttgtgtttttagtagagacagggtttcaccatgttggccaagctggtctctaactcctgacctcaggtgatctgcctgcctccgcctcccaatgtgctgggattacaggtgtgagccacggtgcccagcagttttttgtatattaccttttcttcttcagttcttatcatggtgtcaagcacacagaaagtgtccaaagatttagccaggcacagtggcacatgcctgtagtcccagctacttgggaggctgaggtgggaggatcacttgagctcgggaagcggaggctgcagtgatctgtgatagcaccactgcactccagcctaggtgacagagtgagactccatctcaattaaaaaaaaaaaaaaaaggaagtgtccaaagaagtcggtttgccagagtgatttgcctaacacattcaggcaaagtagtgagcattttgctttctgtttttgtctcactctgttatgggctgaattctttctcctcccaccccatcaatccataggttggcatcctaacccccagtacctcaggatgtatttggagatggggtctctacagaggtgatgaaggtaaaatgaggccactagcgtgggccctaatgcaagctgtctggtgtccttataagaagaggagatgaggacacagacacacacagaggggagaccttggaggacacggagggaagacggccgtctgccagccaaggggagaggccttgggggaagccagccccagatcttggacttccagcctccaaaactgtgggaaaatatatttcttttgtttaagccacatggatcgtggggctttgttaaggcagctgggcaaaccaatatccactctgtgtttatatcaatgtgtattttcatacaattatgtacagctacaaataggaatgcactcacgcatgtttattggggcatcagtaaagcaaggaggttggagtctatgtcttcaggaactaacgggaaccttacggctctactgtagggagggcccctggctggggtaggtgggtggagagtcacagctcctgtctccacagctttccctactcacatgggcagcttttcaccttctctccccagatatgatttccatggctacagggcgatgctcaaatgagtcctcttgaagaagcaaggacaaacagcttaacaaatctcaccactgtactccagcctgggcaacagagcgagactctgtctcaaaacaaaaagcaaaggagccagcccggggatggggaggacgggggcagggcggcctcctatcccccgcttccattaatagactccctcttaccttttctttcttcagtagagacagggactcactgtgttgcccagccttgtctcaaactcctgggctcaagtgatcctcctgcctccacctcccaaagtgctgggatgacaggtgcgagccatggcacctggccctttgtgtcttgtatccaactaaaatgcatcctcagatagggtctttgcagaagagtgaaggttgtctgggtagggcctctagaaatcacccacatctggcaagggcatgacctgttctctccctgcggatgcactcattccctgaatcccgggtccaagattccctccaaagaattccaggctctgggattaaatctatgaaccatctcttaccctccaacgaaatggggtcagcacaccacacattcatcagtcaaataattatgagtgtctgtatttccctagcaagaattattgtttttgtatctttcgttttttgtttgtttgtttgtttcgagatggagtctcgctctgtcacccaggctggagtgcagtggcacgatctcagctcactgcaacctccgcctcccgggttcaagcgattctcattcctcagcctcccaagtagctgggattacccgcatgcgccaacacgcccagctaatttttgtatttttaatggagacggggtttcaccatgttggccagactggtcttgagctcctgacctcaggtgatccacctgccttggcctcccaaagtgctgggattataggcatgagccaccatgccggccaagaattctttactgggcactaaatatatgccagagacttggtggataaattcttatggaggtaagggtctggtgagggagagagatgataaaaaagtaagtgacaaggaaagaagttatctttctgaataagtcagataaaagcagtgtttaagtcaatcaaaacggaggccaggcctggagaatccctgtgcagaccacaccagcctcttgagtcacctcaaccctgctcgatttgcatacataagtgaaacttaacttgagctatttcttgcaaaggcgtacgttaaagaaaaacagtttgagctcactggaggtttaaactcttggactcaggtgatcctcctgcctcggtctcccaaaacactgggattacaagtgtgtgccaccatacccagcctccagtgaccatttacaaatttacaactcggtggcattgagtacattcacagtgctgtgcagccgtcaccaccatttagttccaaagcattttcagcacctcatgttagtctattcaggctgttacaagaaaattccaggctgggagcggtggtttaagcctataatcccagcactttgggaggccaaggtcagaggatcctttgagcccaggagaccagcctaggcaacacggggagaccctatctttaaaaaattttttaaaaaattatctggccatggtggcacacacctgtagtcccagctacccaggaggctgaggcaggaggaacgcttgggcccaggaagttgaggctgcatggagccattattgcattaccgcactccagcccgggcaacagcaacacccagagcaagcaagcaagcaagcaaagaaggaaggaaagaaggagggaaggaaggaaggaaaaatataccatagactgggtggtttataaacaacagacattggccgggcgcggtagagcacgcctgtaatcccagcactctgggaggccaaggcaggtagatcaactaaggtcaggagtttgagaccagcctgactaacacggtgaaaccccatcttaactaaaaaaaacaaaaattcgctgggcatggtggcaggcacctgtaatgccagctactcgggaggctgaggcaggagaatcgcttgaacctgggaggcagagattgcagtgagctgagattgtgccactgcactccagcctgggcaacagagcgagactccgtctcataaataaataaataaataaataaataaataaataaataaataaataaaattgttagggaaacaggagcacaggagagccagactgacaccatttttaaatcaaccccaccttaaaactagcaggggaccttccttgccagtcatgagccgtggtcctcagatgtttacagctaagggagcagctagcggcttaataatgcctgcaaggacaaacgtctaccacaacaaaatgtccagatgtcctgatatcacataacagtatttgctttaaaatgattaaatgctgagacctgggctttaaaaaaaaaagatgattatagttatgttttgatgtgctttcacactaaaatgccaaggatatcttcctttaaatcaagaaagtatttaataatacattttgtccggctgtcagcccacctgcctgcagacatagcttagcttttagacaaggctgctacatcagaagagtttaaaacaaagacagcgagttccttctcctgttttctgaggacgccctgccgtgtaactgagcagctttcaataaacaatctctgctcactgcactctgagattcaccttgaactttcccaccacagatccacgaacactttcttggggtctggatcaagacccctttctctggcaacaaaatcacacagtgtgtactccgttgagcccaggcgccttgagctcacaatcatgtttgtgaaatcgatgcatgtggccgggcgcggcggctcacgcctgtcatcccagcagtttgggaggccgaggcgggcggatcacctgaggtcgggagttcgagaccagcctgaccaatatggagaaaccccgtctctattaaaaatacaaaattagccaggcatggtggcgggcgcctgtaatcccagctactccggagactgagacgggagaatcgattgaacctgggaggcggaggttgtggtgagcctagattgtgccattgcactccagcctgggcaataagagcaaaactccatctcaaaaaaaaagaaaagaaaagaaaaagaaattgacgcatgcgattgtgtgtgactgtggggttgttccacgtcgttgggaccgtttgattcattgtgtatctttccccggcatgaatgtattttccatgtatttatctgctctacgtcacagatactcttttgaggactagtgatctcaaatccacagtgttgattctttacattttatacacctgtgtcacgaccagcggataaggatacagaacatcccagcaccccaccaatttccacccacctctccccgtgctgtagccctttgctccctcagcaccagatgcaacgtctttctgatttctgtcgtcactgattgctttgcctgttctaggacttcctctaagtggaaacatacgctatacatacactatacgtacttttgtgtctggcttcatctgctccacgtggggtctgtgaggttcagccctgtggttggctgcagccatgcatccttccttcgcaacgccctgtagaatctcatgggatggacacgctacgcatttgcatatccatcctactgtgcctagtcctgtgagtactttccaaatctgctgagtgctccttttccaacaaatattttgttcggacccttttgaccttcctgaagtgaaattcatagatatgaaaatgttctgaaattttggccgggcgcagtggctcacgcctgtcatcccagcactttgggaagccaaggcgggtggatcacgaggtcaggaattcgagaccagcctggacacatggcaaatccctgtctctactaaaaatacgaaaattagctgggtgtggtggtacacacctgtaatcccagctacttgggagattgaggcaggagaatcgcttgagcccagggagcagaggtcacagtgagccgagatcatgccactccgtcttaaaaaacaaaaatggccaggtacagtggctcacgcctgtaatcccagcactttgggaggccaaggtggatggacctgaggtcaggacttcaagaccagcctgtccaacatggtgaaaccctgtctctactaataatacaaaaattagccaggcatggtgacacatgcctataatccgcctactcgggaggatgaggcaggagaattgctggaacctgagaggcggaggttacagtgagctgagatggcgccactgcactccaacctgggcaacacagcgaaactctgtctcaaaaaaaaaaaaaaaaagatgttctgtaaacataatgtaaaaacttacctgtaatttaaatcagaaataagggagacatactctattataaaacaatatgtaatttagtcaataaatgctcagttatgatcactgtagaagatatgatgaagccaggcacagtggctcacaccaattatcccaggactttaggaggctgaggcggaaggattgcttgagaccaggagttaagaccagcctgagcaacagagcaagaccccatctatacactaaatatttttaaaatattagccaggtgtggtgatgcacacctgtagtcccagctactctggaagctgaaacaggaggatcacttgagcccaggaggatgaggctgcagtgagccatgatcgcaccactacactccagcctggatggcagagcaagatcttgtctcaaaaaaaataaaaataaaaaagatacaatgaagcaattagatgatgcttccatcagtggtaatgaattgttggctattatttgcatgtgtgtaaatctctgtatatatgtgagaataaatccatatatatttatgtgtgatacatatgtatgcattcttgtgagtgtataagaatatatttgcacagtccaggagcagtggctcatgcctgtaatcccagcactttgggagactgaggcaggaggatcccttgagcccaggagtttgaaagaccttgtctctatcctaaaagataaaaaagaagatattcagccgggcacggtggctctcacctgtaatcccagcactttgggaggccgaggcgggtggatcatctgaggtcaggagtttgagaccagcctgggtaacatggggaaaccccatctctactaaaaatacaaaattggccaggtggtgggcatctgtaatcccagctactcaggaggctgaggcaggagaatcgcttgaacccaggaggcggaggttgcagtgagccgagattgcaccacttcactccagcctgggcaacagagcaagactccatctaaaataaataaatcgcgtccttttagggaataccagggggatgtatcccaagggtggaagccctgctgaggttttccagggtggtaggaggtgggtcggagtctctgcagtgccccaggctgtgaagcttgacttcaggtgtccaccagagtgtcctgttcttttgtcaaacaccagcctcggtgtcactgggaaggtatttttcagatgagattcacatttacgatcacttcaatcaagtaaatcaagtaagagagtgtgccctccacaatgtggtgggcctcattccgtcagctgaaggttgaaagagcaaaaactgtggtttcctggaaagaaagaaattctgcctgaaggctgtagtcacatagaaatcctgattgaacttctagcctgccagcctgctctacagatgttggacttaccagccccacaatcacaggagccaatttcttaaaatacatgttgatagatggatagatggataattatctttctatagatatagagatatagagacatgtacatttccttctccaagggagaccaacatccttggagaggctctctctctctctctctctctctgtctctctgtctctccaggtcaccattaatatagacagaaaacctattcagaaagagagataagtatgtagaccatattttttgagccctgtctctctgagagagagagagagaacctattggttctgtttctctggagaaccctgactgattacagaggcctaagttaacagtgatctggtctagggcagataaatacaaatatgtgcacgatatttttgagaaatatgtaggcaacaggggaagataaagttgactccacgggacttgcagagaggggagtacgtgaggagttactcgtaggtttttgtcttcagaactagacggaccttgacagcatttgctgagacaggcaagccttaaaggcaagagagagaaatggaggtggttcctgtaaaaccatctgcagggtatgtgatgggggcactgggaaaggagaaggaacaggagaggaattggtaagaggcgacgtgaaaagaataaaagtacagagaacttgtgctcaaggagaaagagcagctgggatgtttaccatctctccagcggccagatgaaacctcagctctcaagtccgcaacggaattttccaccaagctaaaggccaggaggaattccaagaattatatacatcaccgtgtaattaaggatgggaagatttttctcttagacactaaacaatgtggacagtgttgcagagacgtctgtttaaaatcacatttctctaaatagccatctgtttcacagattattcctggattcagtcctccacaattttcattcaaattttgagagctgacaacatttaattttataatctgcaggttttgtgtctttacaagtttttagcgtagtgtctggcacacaataagggctcagtggaattattgtgaaatcatatttcctgacatagtcaataaaggaacaaaacattccacattacctaattcgtactctcttctttaaaaatttagagatgtattataattatataaattaaatttataaatgtataatttataatttatttatatattatacatttataaattatatattatgtaacatatattaaacataaaaaaattaaatacattatatataaagatgtactgggcttggtggctcatgcctgtaatcccagcactttgggaggctcaggaggttggatcgcttcagcccaggagtttgagaccagcctgggaaacatagcaagatcccatctctacaaaaaatacaaaaattagccaggcgtggtggcacacacctgtagtctcatcttatctactcagggggctgaggtgagaggatcgcttgagcctgcgaggtggaggttgcagtgagccgtgatcgcaccactgcactccagcctggatgacagagtgagacgctgtctcaaaaaaaaaaaaagccatattgataaaattataccaagatatatttaaatacagaattaactgtgtatctatactttatatacatgtatgaatatatttgaacattaaattataattatgaacataaatttgcatcatatattctacttatgtctccctgggcacatgtctgtatgtgtatctgtggacacacgtccatgaagaaattggatgggatgaactcgggagtaagttaactctgtctgcgtcctgtgcacctgatgcagcaataaatactccatcaaaggcattgcatttcccaaaagcccgtgaggcaggcgtgattctagtgtccattttacagagaagagtactgaggtgtggagagactaagtcggccagcagtgaacaccctcagccactgctcggacagctctcgctcacctccctgcatctccggctccagacgccatggtctccatcactctccctcactcgggatctcatgccggctcccggcttggatcacagacgctgatggctcaaaaacgtgtgtctgggttagagaatccacctgtctcccttagctctgcactggggttgcccaatttaataaataaaaatacaaattgcctggttaaatatggatttcagataaacaataaaaaagaatcaacttttattttagaatcgacttagatttggcgaaaagttgcaaagagaatagaaagttttccttgttcctgcacccagcttcccctgttagtagcgtcttacacgagtatgatttatctcaatattagtgaactggccaggcacggtggctaacacctgtaataccagcacttttggaggctgaggcaggtggatcacttgaggtcaggagttcgagaccagcctggccaacatggtgaaaccccatctctactaaaaaatacaaaaattagccaggcgtggtggtgagcacctgtagtcacagctactcaggagactgaggcatgataattgcttgaacccaagaggcagaggttgcagtgagccaagattttgccactgcactccagactcggcaacgagtgagaccctgactctaaaaaaccgtaaaaataaaaataaataaataattgccaagtgtggtggctcatgcctatctataatcccagcattttgggaggcagaggtgagcagatcacttgagcccaggagttcaagaccagcctgggcatcatggcaaaaacccttctctacaaaaaatacaaaaattagctgggtgtggtggtgcaggcctgtagtcccagctactcgggaggctgaggcaggaggattgctcaagctggggaggctgcagtgagccaagacagcgccactgtactccagcctgagccacagagtgagaccctgtctcaatagaaaaacaaatacataataaatacataaaacgcccatggcagggacacacacgctggtttgggttggagccagcccgtaaacccaaatttgggggcccgggctctcggctgctgcagcactgactaccgttaaggtacaataaaactgacacatgggcagtgaggggaatttgctctcctgcctccctccctaagttcatctgctgagaaaaatgctttgagataaacctggagccacagctctctgcacagtcagatcgcaggaacgcggcctagctgcttcagccacgttctcgcggcgccacctggtggccatggaccgccatcgccgctggacgtcagggccgccaggcccagcgagatgtcacctcctctgaggagccttccaggatcgcacccggcacgcgctccacgcctcgttgtctgttcttcggagcaccgaccatgatcacaaatcagctcgctcgctgtgtttcctgccgggtcgctaccgccatgatccgcacgtagtggtcaaggctgaggttgtatgaatgtggacgttataaccctggctccctctccctccctatgctgggctcccctcgatccccaggcggtggggtgcccctggtttttcctttttaaaattataagtctggccggacgcggtggctcaggaccgtaatcccagcactttgggaagtcgagggagggtgtatcacttgaggccaggagttcaagaccagcctggccaacatggtgaaacaccatctctactaaaaatacaaaaatttgccgggcatggtggtgtgcgcctgtaaccccagctacttgggaggctgaggcaggagaatcgcttgaacctgggaagcagaggttgcagtgagccgagatctccagcctgggtggcagagtgagccttcgtctcaaaaaataaaaaataaaaaaaaggttaaatcaatttaaatgtcaatgtccacaggagctacagatggtaccaatagctcccagctggggctcgtgtatcattggtcagggcttcatcaggattggctactgccccacccttgttaaacatttttaatatcttccttgtctaccagggtcaggcacctcaggtagatgaatgaaggatgggggggatgggggagggagatggaagagggaagggaagcagagggaggaggagtgagtgggcagccctgatcggaggtccctccccatcccatctaaaggggctccctggccgggcgcagtggctcacacctgccatcccagcactttgggaggctgaggcgggtggatcacctgaggtcaggagttcaagaccatcctggccaacatggtgaaaccccgtctctactaaaaatacaaaaagtagccgggtgtagtggttcatgcctgtaatcccagctactctggaggctgaggctggagagtcgcttgaacctgggaggcggaggttgcggtgagccaagatcgccccactgcactccagcctgggcgacagagcgagattccgtctcaaaaaaataaaaaattaataaaataaaaataaataaataaataaataaaggggctccctgctcttctgctccaacctgtggctgccgcataggaacatgggtcacaaaacccagaaatctggattcctttaagtgaaatcttccaaattttatgtttaagaaggtcatgtatttattccttcctaaagaccatgctgaccaaatcaaatgagtctgtggataagtgtgtccaggcttcagactactcccttttggagcctgtggtgtaaagggaacagcttaaagtccctcgccccagtcaacaggggaatttaatgtcttgggttccctggcagaacttttctgttttttttttttttctctttatctaacacttccatgtgtcttactgaaagccagctgcagagttagagcagcgtttggcagaatcaaatatggactagcgcttgcttctgtacggccctcaggttaagcatggattttatatgttcaaattgttgaaaataaatcaggccaggcacagtggctcacacctgtaatcctaactctttgggaggtcgaggcaggagaatcgtttgagcccaggagttcaagaccagcctaggcaacatagtgagaccccccacatctctacaaaaagttaaaaaattggccgggtgcggtggcttaggcgtgtaatcccagcactttgggaggccggggtgggcggatcacctgaggtcaggagttcaagaccagcctggccaacatgatgaaaccccgtctctactaaaaatacaaaagttagctgggcgtggtggtgaatgcctataatcccagctactttcgggaggctgaggcaggagaatagcttgaactcgggaggcagagtttgcagtgagccaagatggcgccattgcactccagcccgggcaacaagagcaaaactatgtcttaaaaaaaaaaaaagttaaaaaattaactgggtgtgttggcacttacctatggtcccagctactcaggaagctgaggtgagagggtcatttaagcccaggagatcaaggcttcagtgagctatggttgcaccactgcattccagcctgggtgacagaacaagaccctttctttattcaaaaaagagagaaaagaaaaaagagagagaaagagaacagaaaaaagaagagaaacaaagaaaagaaaatgatatttcataatatgtgcaaattatatgaaattcaaatcttggcttccataaacaaagctgtgttggcccatggtcacgccttcattgacatcacctggtggcagctttgtgttacatcagcagagttaagtagactgtgtggcctgcaaagcctcaaatacttgctgttctgggccaggcgcggtggctcacacctgtaatcccagcactttgggaggccaaggtgggcggatcacccgaggtcaggggttcgagaccagcccagccaacatgctgaaaccctgtctctactaaaaatacaaaaaaaaaaattagctgggtatgctggcaggtgcctataatcccagctactcaggaggctgaggcaagagaatcacttgaacctgggaggtggaggttgcagtgagccgagatcacaccactgcactccagtctgggcaacagagcgagactccatctaaaaaagaacaaaaaaaattgctattctggccctttcctgggggcatttagagaaaatatttacccacccttctaggtactttgcgtgcattaacttatttcatcctcacagagcatctatgatgaaggcgctgctattatcccatttcaaaggtgagaaaagtgagtacgaaaggtgaagtccatggagacacagctgtgtgaggcagagccaggatttaggctcaggaagcctgaacctagattctagggtgttaactgctacatgaggctgcctctctttctaagcattttcacttgtgtttctctccacatgctatgttctaccataaattggcttccttgaatgggagggccacactgaatcccactgtctctacaactgtgacatcatgtaatgctgactcctttagctttattaaactcaggttctaaccttagccacaggctctccttctgccaagctgtcagctaaatcaaaccatgctctcttatccccagcctgctcctgccttcatctccctcgttttctttttaaagattaattatttttaggctgggcacagtggcttacgcctgcaatcccaacactttgggaggccaaggcaggcagatcacctgaggtcaggagttcgagaccagcttggccaatgtggtgaaaccgcatctctactaaaaatacaaaaattagccgggcatgcggacaggtgcctgtaatcccagctactcgggaggctgaggcaagagaatcgcttgaactgaggaggtggaggttgcggtgagccgaattcatgccattgcactccagcgcctgggtgacaagaatgagactccatctcaaaaaaaaaaaacctgtcatattggattagggtctaccctaatgaccttgtcttgccttaattactcgtctaaagaccctattaccaaatacagtcacatttctaggtgctgggagttaagacttcaacatgcatttggggggacaaaattgagcctataacaagctaattacttaatgttttctgggagatgcctcaacctgtcccaaacgaagcttatgacatcttcccctcacctgctcaccttccagagttgcccatctccaccaatggcaccattatccacctggttacactgaccagaagccaatggcgcccttctcattacccctctcatcggtcaccacgtcctgccgtttgacgctgatcaacctgctcatttccccccatctcctctgccgccactgaaaaccaacccaccaccgtcatctcctgcactgcggaaagttctaaatatccccatcccggacccaaactgcctctcctcacccaggaatcatttgatgtggtcagagcgagattcaaactcctcccaactcctgaaactgtcaaagctggacttgaatacggagcagagccggcgtcctgttggagtgcttgtgagctcaccagtgctccctccctccaccgtcactctaaatcaggactacccagcctggcaccctcagcatttggggttggaggattctttgctgttgggggtgggggaaggggttctgtcctgtgcattgtaggatcttaagcggcatctctggtctcaccaactagaggccaggagcagcccctcacccagctgtgaccatcaaaaatgcctccagacactgccaaaggtccaccggttcggggaagaaccacctctgattgagaccccttccaccatcccgctctaaataataatgatttctcccattatgcagagaaatactaaagtcatccacatagggaggtgagtttaaaagcccatcaggacatgtgcattttactaagccattaatgtccctgcgatttatgagagaacagtaactgcattccggaagacacaaatggctccttccacgatttcattatctgccttgcatgagtgagcctgagtttctgtagcagttgccacgtgctgccactaggtggtggtggaagccaagtcataaagtagtttggggcccttttctgttgctttggttttggggggtttggttttgttttgttttgttttgttttgtttttcgttttgagttttgctgtagccaggctggagagcagtggcacgatctcggctcactgcaacctccacctcccaggttcaagcgattttcctgcctcagcctcccgagtagctgggattacaggcgacttcaccatgcccagctaatttttgtatttttagtagagacggagtttcaccatgttcgaggccaggctggtctcgagctcctgatctcaggtgatccgcccagctgggcctcccaaagtgctgggattatgggcatgaaccactgtgcccggcctttttcggtttttagatctttattttaaaattgacaagcaaaaattgtatatatttatagcatgcaacatgatgtttccatattcttatacattgtggaatggctaaatgtagctacgtaattttctttttttctttttttttttttaagacggagtctcgctctgtcgcccaggctggagtgcagtggcgcgatctcggctcactgcaagctctgcctcccgggttcacgccattctcctgccgcagcctcccgagtagctggggctacagatgcctgccaccacgcccggctaattttttgtatttttagtaaagacgggttttcaccgtgttagccaggctggtctcgaactcctgacctcgtgatccgcccgcctcggcctcccaaagtgctgggattataggcgtgagccaccgcgcccggccctgattttctacatagctttttttttttttcttttgtggtgagaacataaaatctactctgagcaattttcaaagacactttattttttattttatcttttctctcaaattcgtcgctagtattacttgagtagtttctaatacagtcatgtgcctcatagccacgttttggtcaacaacgagccacatacgtgatggtgggcccgtcagatcataatggagctggaaaagccctaccgcccagtgatgcggtagccaaagtaacatcgtagcacaagtactgtacttttaaaatataacttcagtgtagcctaagcttagagtgttataaagtctacagcaatgtcccaggctttcacattcactcactcacaccacccagagcaacttcccatcctgcaagctgcattcatggtaagtgcactatgcaggtggaccatttttttaatccttcataccacatggttactgtacttttttttttcttttcttttttttgagacaggatctcactctgtcccccaggctggagtgcagtgacacgatcacagcttactgaagcctcgacctctcgggctcaatcgatcctcccacctcagcctcctgagtaagtagctgggactacaggcatgcaccaccatgccaggctaatgttggcggggggcgggggatgctgggggggtggggtgtgtgtgcagagatggggtttctccacgcccccaggctggtctgcagctcctgggctcaaggaatctcttcacctcagcttcccaaagtgctaggattacaggtgtgagccatggcgccccgcattactacacctttctcaggtttaggtccacaaatactttcctttgtgttacaaccgcctgcagtactcagtacagtagcctcctgcacaggtgcgaggctaggagcagcaggctattcatgtagctcaggtgtgcagcaggctgccccatctgggttgctgtgagtcactctagaacattctcacaatgaggagatcgcctaaggatgcgtttctcatactgtgtccccttcgtccatcgaggcgtgactgtacctggggcctcagagcacctgcagtccccccaagggccaccttcctgagaccacagtctgggcagccggcctccctgcatcccggagcgcactggggatgaggactcacccaggagagcccgagacacctgagcggccggcacaaaggccctagggaagtgtgggggtacccttggtctcaaagcgctgatccgcctgtgccccctgacctgccagggccggcccccgcttgggtcttggagggcgctgcgcaagcctgcgccccgcactcgcccgggaagggaagggcagggaaggggcgcgcacagcctggcacctgctgtgcaccaggggagacgcgcggcgctccaggtggagtcggcggcggccgagctgcgcggggctgtgcggggctggattctagcctgcaggacgcgaaaacggcctgggtccggcttcctcctcccctgaagcagcgaaggggcgtcactggcgcgctgttaaacgtcttcgccatcggttccctgcatcctccctcctgcctgggtagccagctcctgggcgcgcccaggcgcacacgcttccctcgctcctcctgcagccacaacgcccccaccccccccgcccgcccgccttgtgcggcagcggtgaccgccttctcctgctgccaccccctccaccccctgttcaaggtctgtcaccgtagggggcgggggggcgcgtggagccgctgggggttcggcccaccccgcgaaccgagctcccggccctgtgcgccctcagctctgccgcgggcgttggcctgggcgggcgcaggactgcctggtcgccctggagctcagggtcggggccccgcgtttaaccaccaggcggaggcgcaggcggagcccggagaggacgcgacccctctgggcggccttgggcccctggacgtgccagactctggacccctgcgggggctgccgtggagagcagaggcaccgcgtcctgcccagagctccgataggcgggccgcgttgggggattgtgggggccggcgcgcaggggaaccgtccactcccagggtggcaccaggatgtgactatttccatacccaaatgagggttggatttccatctcctaatatttccacagtttgggggtttcctcaccaacttgtctgacatttctcggccttccttagtgatgacaacactaccgttggttaattttcttcaaaatgtgtgcaaaccacttcatgtatctgtagttaaaatatggaaaggagacatttaatttcttctctttttatttatttattttgattttttaattatttatttatttatttatttattgagacggagtctcgctctatcgcccaggctggagtgcagtggcgcgatcttggctcactgcaagctccacctcccaagttcatgccattctcctgcctcagcctcccaagtagctgggactacaggcgcccgccaccacgcccggctaatttttttgcatttttagtagagatggggtttcaccttgttagccaggatggtctcgatctcctgacctcgtgatccacccacctcggcctcccaatgtgctgggattacagccgtgaaccattgtgcccggccaagacatttaatttctatagcattttatgaagaccagttgctgctgaaatagtctgcctccccacacgcccctcatcatgtttataatgttttcacaaggctcttttctccagatcattttcaacttatttctaacatattatgtgaactcgacacaatatttattttgtttcctccaataatgtagagaccatactttttggttatactcattcctaagcactttacattttattaaactatttgcatggaataatttcccatttcattctaattgtagttattctggaatattatttatttaagtgttattgattaaaatatattcctgtgtgcttggtcatattactaaatttatgacttttcaattattatttcttgtttctttttggttttctaagcagtcatttcttctgtaaatattatgacatatctttcttcctgtccactaggtatactggactttctagtgatatgaaccaataaactttctattgtggcttatatcagtttgtgtgttctgtcatttccaacacaaagaatcttaaccgatacagatttagaagagaaaaagtttcaggcctgtaatcccagcactttgggaggctaaggtgggaagatcacttgagcccaggaatccaagaccagcctggacaacacagtgagaccctgtctctataaaataaaataaaataaaaattagccaggtgtgggtgtgcgcctgtagtaccagctgcttgggagactgtagtgagaggctcgcttgagcccaggagttcagggctgcagtgagcatgattgcactactgcccaccagcctgggtgacagagtgagaccctgtctcaaaaaaaaaagcaagttttagaagcattcttgctaaagaaattgtccctagaaaagtatttattcactaaaatgaacgacttttacttacttttacaattttttataagtcagagtaaaatttaaacacatcgatatagttcatgaaatgattcccctgaacctgacatatactagctttcttcttagagcctcagtgcctaggcagaaacttggcagttcctgagatgacactgtagatatagggagggaaaaagaagaggaaagcaaagcagatgagacagaaaagataacttagtaaggaagttctgtgaccataaaatagtgttcattgttctgaacatcattcaaaaaaaacaatactcactttgggaggctgaggcgggtggtcaggagttcaagactagcctgatcaacaagatgaaactccgtctctactaagaatacaaaaattagccaggcttggtggtgtaatcccagccagcctgtaatcccagctacttgggaggccgagacaggagaatcgcttcaactcaagaggcggaggttgcagtgagccgagatcacaccactgcactccagcctgagcaacagagggacactccgtctcaataaataaataaataaataaataaataaataaataaataaaatgtaaaaggaagattaaaaattcctcttgtgctggaataaaatgatatagatacagaagatgacaactctgaaggataagacctgtgacccataaaataacttttattttatggtcatttcaacttatgaccccaaacatcatttaaaataaatatttagaacatgaaaacaattaactttttaatgaatgaaatgttcttgagaaaactgatcagagccagtgtagtatgcatcggtgcttcatcgtgatctatgcttatgaagattcagttctgcttttacataatatcaagcgacattgtagtaagaaaacaattaacattttagtttgtattggattaggcatttttaaaatgagatactcacacaactgctaacaggaatgcaaaacatctccatttctccactgaatcacctttacatgtaatgttctaaataaataataataaaaatatacacatttccttctgatttcttaaaaatcaacgtaagtattcattggccaggtgtggtggctcatgcctgtaaccccagcactttggaaggccaaggcaggaggatggcttgagcccaggagcttgaaaccagcctgagcaacatagagagaccctgtctttaaaaaaaaatttttaataaaaataaaggtagatactcatctaactgctagaaaaaactaaaaagatgtcataattgaccttatataagttgtatacaatatgagatacactatttaactgcatatattattttggcgggtttttttttgttttttcttacttttttatgtttaaacttttatattatacaaaacacagccctaacataagttttttctcatcttttttttttttgagacagtcttgctgtgccacccaggctggagtgcagtgctatgatcatggctcactgcaacctccacctcccaggctcacgtgagcctcccacctcagcctcccaagtagctgggaccacaggcacatgccaccatgcctggctaatttttttgtattttttgtggagatgggattttgctatgttgtccaggctggtcttgaattcctgggatcaagtgattggcccaccacagcctcccaaagtgcagggattacaggtgtgagccactgcacccagccagttttttccataaacctttaataataggcttttaggtctagaaagtaatttctaatataacagagtttgaaaatgtataagttccattaaattaaatttaatttaatttaattaattaaatttaatttaaatttaattaattaaattaatttaaatttaattaattaaattaatttaaatttaattaattaaattaatttaaatttaattaatttatttaatttaaattaattaattaaattaatttatttaatttaattaattaattaatttaatttaatttaattccaattaattaaattaattaattaaattaatttaaatttaattaattaaattaatttgaatttaattaattaaattaattaaattcaaattaatttaattaatttaatttaattaatttaattccaattaattaaattaatttaaatttaatttaattccaattaattaaattaatttaaatttaatttaattccattaaattactaacatataggctgggtgtggtggctcacatctgtaatcccagcactttgggaggccaaggcaggaggatcacctgagatcaggtgttcaagaccagcctggacaacacggcaaaacgctgtctctactaaaaatacaaaaattaggtggacatggtggcaggcacctgtaatctagccacctgggaggctgaggcaggagaattgcttgaaccggggaggcataggttgcgtcgcagtgagttgatatcgtgccattgcactccagcctgggcgacaagagagagactccatctcaaaaaaaaaattactaacatataatatgaactctttagtttctaataaatattgagctaattttgaaggcttgactcacaaaattttttgcctatatgagttcttgcacgttcactaagggatgaaatgtgagcaaaggcttttccacgcttattaaatatatagggcttctcttcagtatgagttctctcaaatagagtaatggctaaactattttggaaggcttcctcacatgcattagagacataaccatttctctccactatggatttcctggtgttgaataatgtcagtcatgcaacagaatgcttttccacatgtattatgtttgtggggatgtctcttcagtgtgagctctagtatgttgccttaaggaggaaaactcactaaaagccttcctacattcagtactttcataggattttcccctagtgtcagttttttgatgtaggatgagctgggaggtcttgtttcttgttgctttatcacattttttacaatcacaggttttctttcctacatcagttctgccatgctgcaaggaagctgagctgcatttgacggcttctccccattgcttgccttcacagggcttctctcctgggtgagttctcatatgtcgaaaaagagatgaactatcaataaagcctttcctacattgactataatcataaagtttctctccaatgtgaattttccagtgtataataaggtgtgcttttctgctacaggctttcaggcagagagtgcattcttaggattcctcacctgtatagaatcttatgtgtctagcataggatgggcaatcagtaaagcgttcctcacactcattgcatccacagcatttgtctttagtgcatattctttgatgtccaattaggtataaattctgcctgaatacctcctcacattcactacattctgacttgtatgaattttctcatgctttatttaagatgaattataactgaatgatttttcatctccattaaatccataaaggttatttcttctataattaagtaaatcaaaattatgcttcaagccccctccacttaacacatgctcatggagtttttgtcttgaggggatactgtttacaaaagcctcacgttcacagactttctgctcagtacatgttttctcatagatgaaattaatttgatttggaagtctctccttgaccaggcatggtggctcacgcctgtgatcccaaccctttgggaggccaaggcaggtggatcacttgaggtcaggaatttgagactagcctggccaacatggtgaaactccatctctactgaaaatacaaaattagccaggcatggtggtgcatgcctgtaatcccagctacttgggaggctgaggcaggagaatcgcttgaacccaggaggcagaggttgcagtgagccgagatcacaccattgcactccagcttgggcaacaagagaaaaaccccttctcaaaaaaaaaaagaaagaaaaagaaaagtcgctcttcattttcttggtgcatctctatttggttaccagcttcctagtcatttcctaaaagggaagagagaatttatcacttgtgaatcttcccattatcacactgtggaattaaacttctttacacataccccttggtgggtatatactcttattttgtcccatacatcatattttttttacttattggtttttacatctgactttcattaactgcgggcactttagagaccaggatcttagctctagacttcagggttttttttcttacttctgttttcctttgctgacaaccacgtacaataacttcgctcttcagcacaaacctacaatttctctagcccacaaaagcacagcaaatatgaaagatgaagtaaatgccagcttggcacccaatctcatgtcacttggatccacaccatgcacttaataatacacttttttttttgagacaaggtctggctgtatcactcaggctgattgcagtggcacaatcgtggctcactacaacctctgcctcctgggcttaagtaaccatcctcccacctcagcttcccaagtagctgagatgacaggcacgtgtcaccatgcttggccaaggtatttccaacaaataaccttctgctccattcaaaccagggtgccaggctcctcagcttgcagacggcctatagtggaaactcaccttgtatgcgtgtgagtcaatgccccttaataaactcccttttatatatacatctaccatattagttatgtccctctagagaaccctaatacacaggcaaatgatggagctcttggtcttgttcagattcagttccataaacaatatttcagactctatgagtgaaacatgcacagtgccaacccctcactgatcatcagggatgtgtgaccttcttgtgccctgtttgccagatgctcaggggctcacctggactaccctgatatggggttcctgtccccaacatccatggttcttctccccactctaaatgaaagatcacatatgtgccaggtacagtggctcacgcttgtaatccctacactttgggaggccaaggcgggcagatcacctgaggtcgggagttcaagaccagcctgaccaacatggagaaaccccatctctactaaaaatacaaagttagccaggcgtggtggtgcatgcctgtgatcccagctacttgggaggctgaggcagaagaaagaagaagtgcttgaacccgggaggcggaggttgtggtgagccgaggtcatgccattgcactccagcctgggcaacaagagcaaaactccatctcaaaaaaaaaaaaaaaaaaaaaaaaaaaagatcacacctgacatgggaacaggacaccatttttatgggaaatgctggggtctgggggttacaaactggagacaaagaccaaatttctattaacagtagtcctcctgctgtacattagatctctagatttattcatcctacgtaactgcacttctgtaccatttgaccacatctccccgcttcctcctcctccccacccaggtaaccaccattctgtatttgatgttgttgttttttaatttcacatatattcagacaaatttgagtttaaaaaatttttttaattttcacatgtaagtgaaatcatgcaatatttttatttctgtatctggcttatgtcacttatcatcccttagtataatttgagtttcataggctctcacctcattaaaatggcactacagaatcttgtcaaataaatatatctttcaggcactggaaaagtctcagaaagaaaagatatcctctctcctctttagctatagttcaataatacgatttaaataatccgatctgataaggtatccaatgaagaacatttatgggaccataaacttgttcttctctccaaaattcagtgaatatttgtaattgttagcaatctgttatgctctccactaatataaaccaactcttaaaagttattggaacaaaagaaccctgaaaagcactcagtctccagaaattgttgcattaatcattctcattaggtgccttactcaacaatttgttgcctgagttataatcacatccttgaatttccaacatattaacactttaaatatttctttatctcatcacaagatcagcactttcctctcctctgagaagtatgaggtagcaatgtcactgatttttattaaatgttttggagtcttgactcacttaaatgcatattatgtgccaaaatgtgacaggaaattaaatgagatgccaggcatttcagaggaaataaagaaaagaaaatcaagtttaacaaaaggaagaagggtgtccaatagtcatccttaaagaaagcacatttacttatgtatatctaaaggtgtaagggcatggggctgagagccaggttgacaaaggctagaggacagagaatcagagaaatcatccaaaaaagacgagcaagatgatccaaaggacagcgggctggccaccacatcttctaaagcccaaggcaagaatgaccgtggactccatttttaagtccactggtctatctctagtggacaatccagcagtacctatcaaagcttcagcaagtctacctctaagatccacctctactgtctacctctaagcaatcctctaagtctacctctactgatccagcaagtctacctctaagaatgtatcccaggatatacttgtgaagatggaaaaggactgagtattatgattaattactgaagaatggtttctaatggtaaaagattggaaacaacctaaatattcaccaagaaacatctggctaaatctacggtctatacacacagggacattgtgcagttatcataccacactttgtatgtatactatgatgtcaaagtcactcacggttaatgttctttttcaaaagaacattagaggtagattttctggaccagtgtggatctgaaactttaacagatactcccagatttcccactagagataaattggcagtcttaaaaatgggttcacggtctttcgtgcctttggctttagaagacacggtggccagcctactgttctttggatcatcccactcatttctgttgggtaatttctctaatttttcctcctctggctttcttttagcccctttatttatctaagttaaaatttcaaatatttttccaaattaccaaaaataattccattaagaatttgattgagactgggcgcagtggctcacacctgtaatcccagcactttgggagactgacgcaggtgaatcacctgaggtcaggagtttgagaccagcctggccaacatcgtgaaaccccatctctactaaaaatacaaaagttagatgggtgtggtggtgcacacctgtaatcccaactacttgggaggctgaggcaggagaattgcctgaaccagggaggcggggttgcagtgagcccagatcccaccaatgtactccagcctgggtgacagagtgagactctgtctcacgaaaaaaaaaaaaaaagaatttgattgagtgaaaatacctgggcaggagagacactccattctttgtgcctttgatgctctattgtacctttttcttttcttttcaagacatggggtctcactatgtttctcaggccggacttgaacttctgggctcaagccatcctcccacctcagacttctaagtatctgggactgcaggtgcaagccactgcacccaactcttaatgtaccttttacacacatttgtgtcacaacacctgtgccacacccttaacagttttgcagatgcacatcccaacgtttttcagttttgagaaaaatcacttttatttggtaaaaatcacacatgcttatgaaaataattacacattgcaccaaagtgacaaagatgaaagtaatcactccagatcctagttccgagaggttactatctttaacagtaggcaaataataaaatcccaggttttttgttttttcttttgagacggagtctcgctctgtcacccagactggagtgcagtggcacgatctcggctcactgcaagctccgcctcccgggttcaggcgattctcctgcctcagcctccccagtagctgggactacaggcgcccgccaccatgcctgggtaattttttgtatttttaatagagacggggtttcaccgtgttagccaggatggtctcaacctcctgacctcatgatccgcccacctcagcctccaaagtgctgggattacaggcgtgagacacggcgcctggccaatcccaggtattttttctatgcaaatatacagaaggctggatggataaacagataatacatgtaaatacttaaattagaatgtggcccaggagaacatgaactccatgaggtcagggatttttgttggctaggttcacttccacatctcctgtacctagagtaaggtttctcagcctgggcactactgacatttgggctggataactctttttgtaggagattggggtgggtggggagcgtgccatccactgcactgtaggatgctgagtagtgtccttggcctctaccctggcagaagcatccatgtgacaaccaaaactgtctccagacattgccaattgtcccctgggggcaaaactgccaccaagtgagaatcactaacctagaaaagtgagtgttcaatacacaataagtgcttgttaaatgtattacacaaccggaaaatgatgtaagggcaagttaaaaagtaatgcaaactggccgggcacagtggctcatgcctgtaattccaacactttggaggccgaggtgggcagatcaccttgaggttgggagttcaaggccagcctggctaacatagtgaaaccccgtctctactaaaaatacaaaaattagccaggcgtggtggtgggcacctgtaatcccagctactagagaggctgaggcaggagaatcaattgaacccaggaggtggaggttgcagtgagcctagatccccgccattgcaagtcagcctgggcaacaagagcaaaactccatctcaaaaacaaacaaaaaaaaaagtaatgcaaactcatctgggttttggtcatgtcctgcatctcctgaggaagggcagagggctgaggagcagtccttgggaagcacaaacatgtgagaatccaggttggctctatgccctacccagtaacgtagccccaaatctctgccttagctgacatgggggcacactgaagtcttgtgaagggtagaagggaccatgttgaggcagggacaaccttgcctacaggtgattcaggtaatcccacaagttcagccacagaaaacaagcatgaccatgtgcaaagacttccacgagaccacttgtcacagggttgttttaattcaagcaacatcaacatacaccagaaacttgtgaagaaaattatggcacatttgtataacttcagtgtcaagaagccagcggtattttgcagataatgcaaggtctgtagatcgaaaattaagttgggtgtcttcctttagtgtacaaacaccttggatgtttgaggaaatccaaagacaaggttctaggcattttatacgtgttaactcatgtattatgttaattctcacaataatcctttggaactagtacgatcaccatccctgccttattgaggaggaaatggggtacagagagcttaagcaacttgccagtgtcatgcagcagggaagcgctggaggcagggctccaacccacgcagccttgctgcatgtttgtggaatgaacacaggactcaggcacacaaccatctggctgaggctccatgagcagccaggagcctggtcccaatgcagtctccttataggcacaaatggggtgccccttgagacaggaataataaaggtggtcacaggagaacggaaaattccaggcaacagtttcacatgactagcaaaggaaaccgttgaaatcgctgcgtaagctaggggcggataagactctgaaaaccagggtgtgggccaagctggctaaagccgactggacccaacatggtgctggattcgacccgtttcacctaggacctctcattatgtgctcattaacatactaagtcacacacccactgtgacagctctggggaacacccgtatttagtataaaaatgtgtggcaccgcagtaccaagaaatgtttacctttttccaagaatcttcatgaatattccaccccttggttaaataaatatttaaaggtagctccaaaccccgctgggcgtgatgctctgtggtatgcctgcacttttctttcttcagtacgtacttattcccgtcgcaatgaatctccacactttgttctgctcatccatgaattccttctcacgacagtgtcaagagcctggacaccagtcagggtcgaggcctcaccagcatcttggggcctcactgggcacagacgcgtgagcgcccggcctgcagacctgactctggcagccgctcaggccctcagagggagagatggaagctggcaggacgcagttgctaccgcgcggacccggcccccgaccagccttggcccctcgcgcgccgggacagggccacaaatgactgcacctgggcttcgctggcccaggcaccacgcgactctaagcgcgcccaaagcgaccctctgcgcaaactacccccggggacgacgtcacccgtgaggtcccgcggcgcctcctcctaaagctcggctgggaaaccgtccgcttccccaagacttgggggcttgtggccgagttgttttagttttcctgtaggattcacgggtggctgaggcaaacacgcttgaaggcctaagacttttaagtctcttccgcaccctctcttctgtctcttccacctggaggatgaccgcttttttgggggttttgttgttgttttgagacggagtctcgctctgtcgcccaggctggattgtagtggcgccatctccgctcactgcaacctccgcctcccgggttcaagcgattctcctgcctcagcctcccgagtagctgggattacaggcgcccaccaccatgcccggctgatttttgtatttttagtagagacggggtttcgccacgttggtcaggctaatatcaaactcctgacctcaggtgatccgccctcctcggcctcccaaagtgctgggatgacaggcgtgagccaccgcgcccggccgggatgactgttattaacaattcccggcgtggtttctagcaccagcccacctaccacaccccacctcgcttgaggctgaatgggtaacaggatgaacccgcccctgggctggttttctctgaaccctaactcctgccgttacgccccaccagctctaggccaggaactctatgtgccccggccacgctagagcccgtacctagacccgtaggtcgggaggcctgcgcccggcactgcgcagacgcagcgtgctgtgcccagaactcttctgttcccaggagaatcaggggagtcggcgccggaaggggcgggtccgagctgagatttccagagccatgggagccggaagtccaaggaactgtacctccatcatgacgactccggttacgtaaaaacattcaaacagaaaatgctggccaggctcatgcctgtaatcccagcactttgggaggccgaggcgggaggatcgcttgtgcccaggagttggagaccagcctgggcaacatagtgagaccctccccccacccatctctacaaaaaattttaaaattagctagctgagatcatgccactgcactccagcctggacaacaaagtgagactatgtctcaaaaaaatttaaaaattacccacgcctgtagtgtcagatagtcaggaggcagaggttggaggatgacttgagccttggggatcgagggtgtagtgaggtatgatcgcaccactgcactccagcctgggcaacagagcaagaccctgtctcaaaaactatataaaagaaaaaagggctgggtcggtggctcacgcctgtcatgccagcactttgggaggccgaggcgggtagatcacctgaggtcaggagtttgagaccagcctgaccaacaaggtgaaaccctgtctctactaaaaatacaaaaattagctggccatgatggtgggtgcctgtaatcccagctactggggaggctgaggcaggagaatcacttgaaccccagaggtggaggttgcagtgagccgagatcacaccactgcactccagcctgggcgacagagcgagagactccgtctcaaaaaaaaaaaaaaaaaaaaaaaaacagaaaaaaggccgggcacggtggctcactcctgtaattccagaactttgggaggccaaggcgggcggatcaggagttcgagactgcctgggcaacatagcgaaaccccgtctctactaaaaatacaaaaaattagccaggcgtggtggcgggctcctgtaatcccagctactcaggaggcttaggcaggagaatcacttgaacccaggaagcagaggctgcagtgagccgagatcacgccattaaactccagcctcggtgacagagtgagactccatccccgctccgctccctcacctcccgccaaaaaaaaaaaagaaaatgcactgcaatagaaaaataaaagtactacactttggtcaaacagggtaactactagaacgtaaaatgatctttttgaaactatccacatttgttacacgtgttgaaaatgtaggatatatatgttatatatatacttatatatgttatatatacttatatatgttatatacttatatatgttatgtacttatatattatatatacttatatatgttatatctacttatgttatatacttatatatgttatatatacttatatatgttatacatacttatatgttatatatacttatgttatatacttatatatgttatatatacttatacatgttatacatacttatatgttatatatacttatatatgttatatatacttatatatgctatatatacttatatatgctatgtatacttatatatgttatatatatacttatatgtatgttatatatacttatatatgttatatatgcttatatgtatgttatatatgcttatatgttatatatacttacatatgttatatatacttacatatgttatatgtacttacatatgttatatatatacatatatgttatatatatataattatatatatataaaacaaaaagcacggttactacaaagaaaacaggtaaacattaagtggagtaaaagtatatcctgttatataagggacttgaacatgtctgggcatggtggctcaagcctgtaatcccagcactttgggaggctgaggcgggtggattactggaggtcaggagttcgagacctgggcaacatagcaagaccttgtctctattaaaaaatagatagatagatagatagatagatacatagaacatcaaaagagggagagagaaagcagacagatgtggcaaaatatacacaattggtaaatttgggtgaagggaatataagttatttctactaatcttgcaattcttatgtatatttgcaatgatttctaaataaaagtttttaattaccaattgaaataaagtaaaataagtcactatctagccttttctagacaaatattttaaactcttacacagagataagttaatcaagaaacgtatttcctggaaaaacccgtgatatgggtggagccacctgggaataaaaggtcggaacatcataatcactgtcagactcaacttccatcattctcctccaggcgctatggagtctaatccaggcactttggaaggctgaggctggaggatcgattgaggccaggagtttgggaccaccctgggcaacatagcaagatctcatttctgaaaaaagaattatcatccactcacccagaacagctctccaaactgtaagtttcattcaaggtttgcttgtttgggtgatgggatgtgtgtgtgtgtgtgtgtgtgtgtgtgtgtgtgtgtgtgtgtatgtgtgtgtgagtgttggaaggagggtctgtctaaacttaatgccctaaagatattgtcagatattgtgatgaggggaatttcatcttctaccctttatgaggttgaattgtaaattcgaaaatcctgattctgggtttttattttgaggggatagttttctgttttctgtggcattggatattggcattttcagaaaagagcatgcatccaaaatgaaaatgatgaagcctacctgtcttttgaactcagctcagggaaaagctgatgatctctaatttttgtgattcctcctttcattaaatttaaggtccagtgagggtgaagtttccctaaagaggcaataatttatcagcagcaacaggatgaaatggaggggcttttcttcacactctatatattatgttaggatctctcaggaaactgaggacacattaattataatcatggaagattttctgcttcccacatggtttgctgggtttggcatagtatagctcatgccctacattgaagaaatgtgggcacccatcaacagcagccatttctgattacacatccctgtttctttagctgagtgactcctaaaagtcccttaatgtattaataatgcatttggacctcagttttcttactatgttaaatgtaataaaattgaatatcatatggtcacttgcagaattaaatggtattaaggcatgtaaatcatatagagtgatgtagtacaacaaacaataaacctgtaataaaagtcactaaactcccttccctcccatgatggagccttaattttctctatatgaggcatccctgtagtttaatatattcttagaattagcaataggaatatgatgtcaacaattaattttgagccattttagcccaatgacttatcctaagaagtcgctattattgttgccatcccgttttcacttatacgaaagtaagactcaggagggttgagtttcagccttagtgttagaaaagcagtaagcggtgaagccgggcttggaatcctggaagttggaatgtacaatgtgtgatctcgatgcatcctctctgtagtgcctctttgtaacaagaaaaaaataaagatacttaaagttctaggtaagcaaagtcagaactagtctttaagttagagacccataaagtataaggtttctcaaacaacaaatgttgttagaaggtcttgttgtggcagagttccaagaaaaccaatgaatgtgaagtcagttgatatattaatctaatctgtgtaattggggaggggcacttttaggaatgcatttagagataatcccattaacacaggaggttttctcccagattaaattaacgtaaacgactttggaggaaggttggttttcccagtttctaagatataatgcaataaattaacatgaaagatggttgggactatgtgcagactttttaaataaacctcagtttcaggactctgacctttttgtttcttcctagtaacagccgtggcagtcagagctctgcctgcagtgtgaccatggacagctctccaaagcttaaacttcagtaaattgactcaagtttcttcggaaagaactgtgagtagcaaagggcaactttttctgttggtttcattgggatttcactgcttttcctgaaattggaatgttggaaggaagtaggcattcctcactgcctggggagaaatgggcaaatgagtaaggggagggagcaaattcagagagatattttttattttttctgaaacctgtttgtgttttgagatgtctttcccttcatgtttttttttttttcactcttcatatttccctttctctgtctctctccccacctcggttttgctaattagctagcacaacaactcgccatcttactccttttccttactccctgttttttgtggggttttttttttggttttcttttttgttttttttttgtttttgtttttgttttttgtttttcagacagagccttgctgtgtctccccagctggagtgcagtggcgagatctctgttcactgcaacctccacctccagggttcaagcgattctcctgcctcagcctccccagtatctggcactataggtgcctgccaccatgcccggctaatttttgtatttttagtagagaccaggtttcaccatgttggccaggctagtctcaaactcctgacctcaggtgatccacctgcctcagcctcccaaagtgctgggattacaggtgtgagccaccgtgcccagacagaacttctttatttttgccttaattttgttatttaaccagtagtcattcaggagcatcatatagagtgatgtagtacaacaaacaataaacctgtaataaaagtcactaaactccctttcctcccatgatggagccttaattttctccatatgaggtagtttaatatattcctaggattagcaataggaatatgatgtcgacaattaattttgagctgttttagcccaatgacttatcctaagaagtcgttattattgttgcagtcccattttcacttatgtgaaagtaagactcaggagggttgagtttcagccttagtgttacaaaagcagtaagtggtgaagccaggctttccatgtagttgtgtggtttttagtgagtttcttaatcctgagttataattggattgcactgtggtctgagagcttgtttgttatgatttccgttcttttgcatttgctgaggagtgttttacttcgaattatgtggtcaattttaaaataagtgctatgtggtgatgataatattgatctatctaatattaacaggggggtgttaaagtctcccactattattgtgtgggagtctaagcctctttgtaggtctctaagaacttgctttatgaatctggatgctcctgtattgggtgcatatatatttaagatagttagctattcttgttgcattgatccctttaccattatgtaatgccctctttgtcttttttgatctttgttggtttaacatctgttttatcagagactaggattgcaacccatccttttttttgctttccatttgcttggcaaatattcctccatccctttattttgagcctatgtatgtctttgcacatgagataggtctcctgaatatagcacatcaatgggtcttgactctttatccaatttgccagtctgtatcttttaattgggggcatttagcccatttacatttaaggttaatgttgttacgtgtgaatttgatcccatcatcatgatgctagctggttattttgcacattagttgatgcagtttcttctgtgtcattggtctttatattttggtgtgtttttgcagtggctggtaccggcttttcctttccatatttagtgcttcctccaggagctcttgtaaggtaggcctggtggtgacaaaatccctcagcatttgcttgtctgtaaaggattgtattttttcttcgcttatgaagcttagtttggctggatatgaaattcagggttgaaaattccttaagaacgttgaatattggcccccactgtcttctggcttgtagggtttctggagcaatccactattaatctgatgggcttccctttgtgggtaacccgacctttctctctggctgcccttaacatttttttcctttgtttcaaccttggagaatctgacgattatgtgtcttggggttgctcttctcgaggaatatctttgtggtattctctgcatttcctgaatttgaatgttggcctgtcgttctaggttggggaagttctcctggataatatcccaaagtgtgttttccaacttgattccattctccccgtcactttcaggtataccaatcaatcgtaggtttggtcttttcacatagtcccatgtttcttggagcctttgttcattccttttcattcttttttctctaatcttgtcttcacgccttatttcagtaagttgatcttcaatctctgatgtcctttattctgcttgattgatttggctattgatacttgtgtatgcttcacgaagttctcatgctgtgtttttcagctccatcaggtcatttatgttcctctctaaactggttattctagttagcaattcctgtagccttttatcaaggttcttagcttccttgcattgggttagaacatgctcctttagctcagaggagtttgttattacccaccttctgaagcctagttctatcaattcatcaatctcattctctgtccagttttgtgtccttgctgaacaggagttgcgatcatttggagaagagacattctgttttttggatttttcagcgttgttgtgctggtttttcctcatctttgtggatttatctacctttgatctttgaggctgttgatctttggatggggttattgtgtgggggtcttttttgttgatgttgatgttgttgctttctgttagtttttcttctagcagtcaggcccctcttctgcaggtctgctgcagtttgctggaggtccactccagacccttttcacctgggtatccccagcggaggctgcagagctgcagaacagcaaagagtgctgcctgttccttcctctggaagatttgtcccagaggggcaccagcctgatgccagccagagctctcctgcatgaggtgtctctcaacccctgttgggagttctttcccagttagaaggcacgggggtcagggacccacttgaggaggcagcctgtcccttagcagagctgttgtgctgtgctgggaaaatccctcttatcaggatcagctgctctcttcagagccagcaggcagaaaagattaaatctgctgaagctgtgtgcccacagccaccccttcccccaggtgctctgtcccagggagatgggaattttatctgtaagcccctgactgggactgttaccctttcttcagagatgccctgaccagtgaggaggaatctagagaagcagtctggccacagctgctttgccatgctgtggtgaactttgcccagtccaaacctcccaccctccttagcactgtccagggaaaactctactaacgcctcattaatcacggatgcgcctcccccaaccaagttccatcattccaggtcaacttcagactgctgcactggcagtgagaatttcaagccagtggttcttagcttgctgggctccatgggagtgggacctgctgagtgagatcacttggccccctggcttcagccccctttccaggggagtgaatggttctgtctcactggggtttcaggcaccactggtgtacaaaaaaaaatcaactcttgcaactagctcggtgtctccccgaacagctggctagttttgtgcttgaaacccagggccctggtggtgtaggcacacaagggaatctcctgatctgcagattgcaaaaactgtgggaaaagcgtagtaaccgggcgagtagcatagttcttcacggcttcccttggctgggggagggaggtccctggctccttgcatttcccaggtgaggcaatgccccaccctgcttctgctcgccctccatgggttgcacccactgcctaactagtcccgatgtgatgaactgggtacctcagttggaaatgcagaaatcgcccaccttctgcattggtctcgctgggagctgcagagcggagctgttcctatttggccatcttggccccgccccttttttaattttaaaaaattttatgtagcgatgaggtctccctattttgccatgctggttttgaactcctgggctcaagtgatccttccacttggcctcccagagtgctaagattacaggcgtgagccaccatgcccaaccaaatttgtattttctcgatgagcagtgatgctgagcacctgttcatatctctgttggccatttgtatattctttctcgcctaacagctcccttgaaaatgcgtgtgcctcagtctatgtcttctggagaactggcacagcttcagaatattagcaccccaaaagagtattttacttagagcataagaagactaaaaataaatcattattatatgtggatgaggtttttcataaaatataactgttaatatattcttggttaaaatgcatgtgtgcttttcttctttaggttacataaagaaaggatgatatctctaaaggtatgtggattcatccaaatttggagccagaagactgggatgactaagctgaaagaagctctcattgaaacagtgcaaagacaaaaggaaattaaactggtggtcactttcaaatctggaaaatttataagaatttttcagctgagcaacaacattagaagtgtggtccttagacattgtaaaaaaagacaaagtcacctgcgtttaactttgaaaaacaacgtgttcttgtttattgacaaattatcctacagagatgctaaacagttgaatatgttcctggacataatccaccaaaacaaatctcagcaacccatgaaatctgatgatgattggagtgtgtttgaaagcaggaatatgctgaaggaaattgacaaaacttcattttacagcatttgtaacaagccaagttatcagaagatgcctttgtttatgtcaaaatcaccaacacatgtgaaaaaggggatattagaaaatcaaggtgggaaggggcaaaacacactatcatctgatgtacagacaaatgaggacattctgaaggaagataaccctgtaccaaacaagaaatataagacagattccttgaaatatatacaaagcaataggaagaacccatcaagtttagaggatttagaaaaagatagagatttgaaactcgggccttcattcaataccaactgtaatggaaatcctaacctagatgagactgttcttgcaacccagactctcaatgccaaaaatggtttgacatctccattggaaccagagcacagccagggtgacccaagatgcaacaaagcccaggtgcctcttgactctcattcacagcaactgcagcaggggttccccaatttgggaaacacctgttacatgaatgcagttttacaatcgctatttgcaattccatcttttgctgatgacttactcactcaaggtgtcccatgggaatatattccctttgaggctcttattatgaccttgacccagctgcttgctttgaaagatttctgtagtacaaagatcaagagagaattacttgggaatgttaaaaaagtcatttcagcagttgcagaaatattttctggcaacatgcagaatgatgctcatgagtttttaggtcagtgtttagaccagctgaaagaagacatggaaaaattaaatgccactttgaatactgggaaagaatgtggggatgaaaattcatctccacaaatgcatgttggtagtgctgccaccaaagtgtttgtttgccctgttgttgctaattttgagtttgaattgcagctctcccttatttgtaaagcttgtggtcatgctgttctcaaggtagaacctaataattatctctccatcaacctgcaccaagaaacaaaaccacttcctttgtccattcagaattctttagatcttttctttaaagaagaagagcttgaatataactgtcagatgtgtaagcagaagagttgtgttgcaaggcatacatttagtaggctctccagggtccttatcattcatctgaaacgctatagcttcaacaatgcttggttgctggtgaagaataacgagcaagtttatattcccaaatctttaagtttatcttcttattgcaatgaaagcaccaaaccacctcttcccttgagcagtagtgcacctgttgggaaatgtgaagtcctggaagtctctcaggagatgatttctgagatcaacagcccattgacaccatcaatgaagctgacctcagaatccagtgattccctggttctacccgttgaaccagacaagaatgccgacctacaaagattccagagagactgtggagatgcaagccaagagcagcatcagagagacctggaaaatggctctgcactagagtcagaattggtccactttagagatagggcaatcggtgaaaaggagcttccagtggctgactcactgatggaccagggagacatttctcttcctgtgatgtatgaagatggagggaagctgatcagcagcccagacacaaggcttgtcgaggttcatcttcaagaggtgcctcaacatccagaacttcagaagtatgagaaaaccaatacattcgtagagttcaattttgacagtgtcactgagtccaccaatggcttttatgactgtaaagaaaacaggattccagaaggatctcaaggaatggctgaacagctccagcagtgtattgaggagagcatcatagatgaatttcttcagcaggcaccacctccaggtgttaggaagctggatgcccaggaacatacagaagagaccctcaatcagtctacagaattaagacttcaaaaggctgacctgaatcaccttggggcactgggttctgacaacccaggaaacaaaaacattttagatgcagagaacacaagaggtgaagccaaggaactaacaagaaacgtgaagatgggggatcctctccaggcctacagactcatcagtgttgtcagccatatcgggagctccccaaattcaggccattacatcagcgatgtgtatgactttcagaagcaggcctggttcacatacaacgatctatgtgtatcagaaatctcagagaccaaaatgcaggaggcgaggcttcactctgggtatatcttcttttacatgcacaatgggatttttgaggagctgttaagaaaagcagagaactctcggctacctagcacacaggcaggggtgatccctcagggggaatacgaaggtgactctttgtacagacctgcttgacagactcactcggcctcacttcatccttgcaaagagaatcctgtacttcatccttgcaaagagaatcctgtacttcactcagaatgaaggaacaagtatctcaggatgaaatctcaatgaaaaacacttattttgggggaatatctattttaactgcttcagacacctagatcccagaactcaggcgcatatgcatattttccctgcaagattagaatggtgctcttcacgttttgacggtggttttcaaaatgttgttcttcaaccagcaacagcaacagctagggactgattagaaatgcaaattcttgggtcactctctagaccaactgatgcagaaacaggaggtgtgagccagcaatcagatggagattctagtgctcatgaaagtttgaagaacactggtaatgtgtggagtatcttggtgtattttgctactgttgatatggattgcttatgttatataaacgattttcattaaattttttgcactcttttattttgtcccactgaacctaagactagatagagtcaccccaaaagtggcagcagggaaattccaacaagagagtgcccaaaaccattctgagatcgggccggttgggattccaaagaaagaagcaccaaacaccagagggatctttccggagcatttattagggggaacttagagagttctgcagcataccctcaggcggacagtgagagaaaaaagcatggtcaaccagctgggcaccgtggctcatgcctgtcatcccagcactttgggaggccaaggtgggaggactgcttgagcagaccagttcaaaaccagcctgggaaatatagcaagaccctgtctctacaaaaaataattcagcagccaggcacggtggctcacatctgtaatcccagcacttgggaggccaaggcgggcggatcacctgaggtcgggagtttgagaccagcctgaacaacatggtgaaactccgtctctactaaaaatagaaaattagctgggtgtggtggcaggcacctgcagtcccagctactcaggaggctgaggcaggagaatcacttgaacccagcagatggaggttgcagtgagccgagatcgcaccactgcactccagcctgggcaacaagagcaaaactccatttctaaataaataaataactttgccaggcatgtctcagctgctcaggaagccgatgtgggaggatcacttgagtctgggagttcaaggctgcagtgagctatgatcacactactgcactccagcctgggtgaaagaccctgtctcaaaaaaaaaaaaaaaaaaaaggcgggaggggggatggtctaccttggtgtgtctgctgcagtgagagggtcagggtatggggttatataagtttataaggaatttggtcaagggtggggactagtttcttttagtgttttgggcaacaacctaaacctaaatacctctatcagtgcctgggaatgtttcaggctctactttggattcaagccttctgggaaaagcctgcagcttggctggtcagagtggtcaaagcagtccatgattttcagtcacgacacagaaagaaagcagggggtgagtacttttcctttgtaaagttattaaaataataacccaacccatacatataccattggctagcttccacatgtgtttatgactggtgactagtaaaatttgctatgcagcaatcaactgttatttaccattttccaggaatttcagggcataacattagggttatatgcaaaatgcagtatactaaatatccgtgtgattttgtgaattcaaaagcactgcaagatgttgctcatgttattaatatgaataagacgataaacccatcctcataaatgtacaacatttcctggtggccaagccttaaacagcttataatgtacccagtatcagtgggtgatgtgttagactgtgaattcagcaaggagtaaagaacgatttttttaaatggccatgtgagtagacaaatggaaattgagaggattttttgggtaaaaagagataagagcctggtattatataaggaatggggcaaaattaggcagagtaggtgtgggaaagaagagaagagcaaccagaaacatacgtacgaggtttttaaaaatacattatttttagcatttaagaggaaaagaaggaaagtactatgaaaaaagaaatgtaggccggtcacagcggctcacgcctgtaatcccagcactttaggaggccaaggcaggcggatcacaaggtcaggaaatcgagaacatcttggccaacatggtgaaaccccgtctctactaaaaatacaaaaatgagccaggcgtggtggtgcatgcctgtcgtcctagctactactttggaggctgaggcaggagaatcacctgaaccagggaggcggagattgcagtgagctgagatcacaccaccgtactccagcctgggtgacaagagtaaaactctgtctccaaaaaaagaaaaagaaaagaaagaaacgaggctgagtgccatggctcatgcctgtaatcaaagcactttgggagcctgaggtggaaggattgcctgagcccaagagtttgaggctgcagtgagctatgactacaccactgccctccagcctgggcaacaggtgacaccctatctcaaaaggaaaaacaaaaaaggcaaatggcaattgcagtgaagaaatgccaagataccttcatgctcaggagagaaagctgtacttcctggatgtggtttccagtcccctacacctctagagaaacctctccactcatgaattatagaaatcatccctaaaagtataaagtgctgtcttatttgtttattttattttatcttatttttgagatgaaattttgctcttgttgcccaggcaggagtgcaatggtgcaatattggctcactgcaacctctacctcccaggttcaagcaattctcctgcctcagcctcccgggtagctgggattacaggtgcccacaactatgcctggctaatttttgtatttttggtagagacagggtttcaccatgttggtcatgctggtctcgaactcctgacctcaggtgatgcgcccacctcagcctcccaaagtactgggattacaggcatttgagccaccacgcctggccaaaagtatagtcttttaaacgtttttaaagatatggataccactggtcattattcactggaataaaactccatcagggttttagcacatttggtttattgctacatcttcagtgtttaagagttcctggtacacaaaaggcatctaataaatatttatacttaataaacatttgctgagtgagtatgccgaatgggttttcaaaggatactgtgataataagtcctcgctaccttcaaaaatagcctccaaattagaggccatttcaacatggaattctggggtgacaattccaggcaaccatatcttcccatgtttttttaagtgcatggggctcctatctggagtgaattcttttctggtgcctaacaaggtatgacctgtcagcgaaggctttaccgcattcagaacatccataaggtttttgtccagtatgggtttttttatgcaaactaaggtttaatttccggatgaaggtttttccacattcactacatctataggtcctctctccgctatgagttttctgatggctatgaaggtttgacttctgaaagaaggcttttccacatctgttacattcatagggcttttccccagtatggatttttttatgttgaatgaggtttttcttctggataaaggtatttccacatagatcacactcataagctctcttcccagtgtgaattttctcatgatcgatgacattggatttctgggaaaaggccttctcacatatgctacatttatagggtttctctcccgtgtgtattctctggtgtttcacaagatctgacttgtaaatgaaagcctttccacagtccgtacattgaaagggtttttgtccagtgtgaacttttttatgttgaatgagggttgagttctgcctgaaggatttctcacattcattacactgataggatttcttggcattatgaattttctcatgattaatgcaggatgatttccaggaaaaggcttttccacatgtcttacactgatagggtttctctttagtatgcattttctgatgttgaaagagatttgacttctgcttgtaggcatttccacagttctcacatttatagggcctttcctctgcgtgagttttctgatgtttatcaagcttccacttctccccgaatgctcttccacagctatgacattcaaagggtttttgacaggcatgcctcctcaggtgactttgaaggcgtgactttgaactgaataactttctacaggcattacatttcagttgttgtcctacaaatttggatggattattgccaactaattttctgtatccattatcatcgtgagaattattttgtacatagtgttgcaaggaagatacatcatctatgcccagtggaagtattttcttagatccgtcacattctacacctttctgcgtagtcagcgtttccttattgattgatgggacttctcttgcgagactctctttcacatcctttggcttccaaatctgccctccaatgtccccatttttttctaaaatggaatacaaaaaaatgtcctgtgtaaaacgttccactcacatgcttgaaataaaatgccataaacaatctattgtggtgattattctggcttcaaacctaatgtctacgagaaaccaaagttaatataagctctgttagagttctatgtgagctaatgttacatgaagctatcacatatctgtctgtaaaggactgagcaacgtagacctagtgcacagggagcaggtgagagcctagggataccagggagagggagattaagaaagagagtttgccaggccaggcacaggggctcacacctgtaatcctagcactttgggaggctgaggcgggtggattgcctgaggtcgggggttcaagaccagcctgaccaacatggcgaaaccctgtctctactaaaaatacaaaaaattcgccgggcatggtggcaagtgcctgtaatcccagctactcgggaggctgaggcaggagaatcgttcgaactcgggaggcggaggttgcagtgagcccagatcgcgccactgcactccagcctgggcgacagagactccgtttccagaaaaaaaaaaaaaagaaaaaaaaaagagtttgcctgcaaaggaaaacccagataagaatgtaaagaaatttctgagtggagaaaaatacctggagatttcttccagcactcccaggaagtcacagctggctgccaaacgacttcctcatttagaaaagctgaattggcttccatgcaccattgacccacagtgctctcctggtcacctacctgcacggccacttcccagcacttcctcttcctccaaccatggctcctttccttgttccaacctcaagatcacatcgggtttggtggtttccccttgtcctgtgatggaagataccgcaaggcttggtgtttgtggatgtgtgagttgtttgtgcaagtgtatgagtgtatataagcgcttgcgtatgcttgtgtgaatatttgtgtgtgagtgtgagcatttatatgtcagtgtgtgggtatgtgccattggttggggggagttgtgtggatggatggtttgagggaatgcacctgagcagtcgaactaaacaaagaatgctttttctgggctgggtgtggcggctcatgcctgtaatcccagcactttgggaggccgagataggagaattgctagagcacaggaatttgagaccaacatgttacatgtaacatgaagatagcaagacccagtctctacaaaaccaaagccacgtgtggtggtgcacgtctgtggtcccagctattcaggaggctgaggtgggaggatggcttgagcccaggtcaatgttgcagtgacgccaggcgtggtggttcatgcctgtaataccagaactttgggaggctgaggcgggccggttatctgaggtcaggagttcaagactagcctcaccaacatggagaaaccccatctgtgcaaaaaatacaaaaattagccaggcatggtggtgcacgtctgtaatcccagctactcgggaggctaaggcaggaaaatcactggaacctgggaggcggaggttgcagtgagccgagatcacaccactgcactccagcctgggtgacagagcgagactgtctccaaaaaaaaaaaatactacagtgagctatgattgcaccactgcactccagcctcggtgacacagccagaccctgttaggagaaaggagataaagaaagagagaggaatggagagagggagggagggagaaaggaaggaaggaaggaaggaaggaaggaaagaaggaaggaaggaaggaaagaaggaaggaaagaaggaaggaaggaaggaaagaaggaaggaaggaaggaaggaaggaaagaaggaaggaaggaaggaaagaaggaaggaaagaaggaaggaaggaaggaaagaaggaaggaaggaaggaaagaaggaaggaaagaaggaaggaaggaaggaaagaaggaaggaaggaaggaaggaaagaagggaggtaggaagggaggaagggaaggaggcagggagggagggagggagggagggagggaaggaagggaaagaaagaaatgctttttcttcttggaggataaagcttttccaaaaatcaagaccaggagtagggtgaagggcagggcacccagcccacaaaacttacagaggccctcactcattctcccggcacttgccgaccctgagaatgggggctccttcaatacagcacttggtacacttcacttgcctcaccctagtcccggctctacaaaaacatatgcgaagtgaggagcacctctgtgccaaccctatttggccagccatggggtgtctgtgtgtttcacgccttaggttttgagtccccctgcccgggaagccgtccttacccacagagacaaggttgctgtaattctccagcatcacatccctgtacaagtttctctgttcgggattcagccgctgccactccccctgggtgaagttcacagtgacatcctcgaaggtcactcttccctgtaacaacagattcccgatcagtataaaaatgccattgaatcctgcggctgaggatacagaaacttgtttctgctgaaccaagctttaatcatgtccataattcactctactctggatgaaaataaattgtgcccagaggatcttgccaatgagccataaaccttagacctactcatgacactgccatctttctccaccctctagtcccaccaattttacttcctgaatctcaaacccagccattagtttccatcttctccaccattcataaatccaccttgtcatcttttacttagagtaaggcagaggccgagtatggtggctcacacctatcatcccaacattttgggaggccgaggcaggaggattgcttgaggccaggagtttgaggctagctggggaacatagcaaaacccctatctcaaagaacattttattattttggccgggcacggtggctcacacctgtaatccctgcactttgggaggccgaggcgggtggatcacctgaggtcaggagttcgagaccagtctggccaacatgaagaaaccccatctctactaaaaatacaaaaaattagccaggcatggtggcaggcgcctgtaatcccagctactcaggaggctgaggcaggagaatcacttgaacccaggaggtggaggctgcagtgagccaagattgcgccactgcactccagccagggcaacaagagcaaaactctgtctcaagaaaaaaaagaaaaagaaaaagaaaagaaaagaaaatgttattatattttttttctattttccatttttctttaagacatcctgcctctattagaaattcttttttaaatagaggcctggcatggtggctcacacctataatcccagcacttcaggaggctgagacaggtggatcacccggggtcaggagttcgagaccagcctcgtcaacatggtgaaaccccatctctactaaaaatacaaaaattagccaggtgtcgtggtgcgcgcctgtaatcccagctactcaggaggctgaggcaggagaatcgcttgaaccctgggaggtggaggttgcagtgagctgagatcacaccactgcactccagcctgggtgacagtgagactccatctcaaataaataaatacataaataagtagaataagccaatagccccctaattcttccagctacatctaaactgactgtaatctattttccacagtcgacattcagactggatggtgcgctcccctaatttatcagctttccttgcatttgggagaaacaggtgacacctgttacaggggccagcgtctggcatgtctaccacactcccactcacacagggtcacacagcactcccctgggtctctcctgcagccatactggacttacggcagcattttgcccctgccactcaacactcacagtgttggaagtcacacttgtaaagcgaattcctttgtcagaaactgaaaatctcacctctaagagccagcacctagtgtcctcttggacagataaattttttagttgtgtttgtgctctagctcgcttttttaaaattttgtttatttattaattttttttggcggggaaggggacagaggctcactctggtagcccaggctggagtgcagtggcacaatctcggctcactgcaacctccacctcctgggttcaagcgattctcctgcctcagcctcctgagcagctgggattacaggcgcgcaccacgacacctggctaatttttgtacttttagtagagacgggtttcaccatgttggccaggttggtctcaaactcctgacctcaagtgatctgcccgcatcggcctcccgaagagctgggattaaagggatgagccaccgcacccggcctttttttttaaatttttgacacaggttcttgctctgccacccaggctggagtacagtggcatgatcatggctcactgcagcctcaacctcccaggatcaagcaatcctcctacctcagcctccagaatagctgggactacaggcatgcaccaccatgctaagctcattttttattatttgtagacagggtctcactatattgtccaggctggtcttgaactcctggcctcaagtggtcttcctgccttcgcctcccaaagtgctgggattacaggtgtgagccaccacacccagccttagtatgcctttcctgtcaacaggaaattggtcaacaggcttaattttaacaattgcaaagaaactactatctgcctaactgcatacaacttatccttggtctttcagctatccataatttactttgattccgactggtactagttaatgatttttcagtttattgtgtggatttacagaatttgtttcaaatacacaccgaacaaagttgggagaggacacacattcaagacaccaatcatttaaaaaataggttggggtgaaacacacatgacactgttacatctcagggcttagcagtggaccaggtttgtaagagcaatggtcaaaagatgcttgaggctgggcgtggtggctcacccttgtaatcccagaactttgggaggctgaggcgggtggatcacctgaggtcaggagttcgagaccagcccgaccaatatggtaaaaccccatctctactaaaaatacaaaaattagccgggcgtgggcgtggtggcgtgcgcctgtaatcccagctgctcaggaggttgaggcaggagaatcgcttgaacctgggaggtggaggttgcagtgagccaagatcaagccattgcactccagcctgggtggcagagggagactgtctcaaaaaaaaaaaaaaaaaaaaaaacaacaaaacaaagatgcttgagctgaaaccagcccagtaatcccatagacagttgtgggttttttgttttttgtttttgtttttgtttttgttttttggataaacatagaaattgacccttccgctgttaaagcttgaaacctgtatttgttttgtctgagttccttcctcaggaaaagaccttcagatctctcaaaggcaggcagatcacctgaggtcaagatttcgaggccagcctggccaacatggtgaagccccgtctctaccaaaaaatacaaaaattagccaggagtggtggtgcgcacacctgtaatcccagcaactcaggaggctgaggaaggagaatcgcttgaacctgggaggcagaggttgcagtgagctgagattgcaccactatactccagcctgggtgacacagcgagactccctcaaaaaaaaaaaatcaactgaaactcaccacaactgaaactcaccacaacagatgtctccttgccccctccctagtcttgctttcttacacattgttatatttcttccatgctgtataaacccctagttttagtgagttagggagatggatttgaggctgagctcccatttcttcacctacggcagctgattaaagcttcttccttggcaatacccattgtctcagtcattggctttctgtgcagccagtagcaggacctagaccaaactcctggtgtttccgtaaccaagctttttttttttttttttttgagacagggtcatgctctgtcacccaggctggagtgcagtggcacaatcatggctcactgcagcctcaacctcccaggttcaagcgattctcccacctccgcctccagagtagctgagactacaggtgtacgccaccaccaccacacccagctaattttttgtagagacgggatctcgccatgttgcccaggctggtttcaaactcctgaactcaagcgatccgcctgccttggcctcctagattgctgaattacaggtgtgagccaccatgcccagccttgagctttacttgaaatgtttcagctttaataggaaagcagaaagtagagtgtgtgttaccttttaatagaagtatggaaggaaggaggaaaatatgccaaaaggttagcacagttaattctgagcaagaggaacgtgggtcatacgtttattcattatgagatttagatttttttgaaaagctcacctgggaattgttcatttcctgttcttcaccagtcagtaaagtcttgggaaggcagatctgagggaaaatggaaaagaaccatgaaatagcagaattcgctttggaagttggggatcatccagcatagaatgctccacaccctggataaaagctctccctaacccactcagaaaagccctgacttgtacctcagtgatccccttctgaaggtcttttttttttttgttttggtttttttgtgtttgtttatttattgagactgggtctcaaagaagaaagtgcaagccaggcacggtggctcacgcctgtaatcccagcactttgggaggctgaagcaggcagatcaccagaggtcaggagttcgagaccagcctgtccaacatggtgaaaccccgtctctactaaaaatacaaaattggctgggcgcggtgactcatgcctgtaatgccagcactttgggaggccgaggcaggcggatcacgaggtcaggagatcaagaccatcctggccaacacggtgaaaccctgtctctactaaaaatacaaaaacaaaattagccaggcgtggtggcgggcgcctgtagtcccagctactcgggaggctgaggcaggagaatggcgggaacccgggaggcggagcttgcagtgagccgagatcgcgccaccgcactccagcctgggcgacagagcgagactccgtcccaaaaaaaaaaaaaaagagagagagagaaagctaaacagcagttcaacagcacctttaaaacaagcctgtgcaaagacaatgaggcaagcatcagatcagctagagcacagtaaggaaggccgagagcagaaaccatgaatcctgaagcagctgtggtcgtgacgaataacgccgcagtgaacatgggatgcagatagcccttcagctttgccataagcgggacagctggatcattggtaattctttgccaaaagcgtagattttggccacgcgtggcagctcacacctataatcccagcactttggaaagccaaggtgggaggatcagttgagcccaggagttacttttttttttttttttttaagaccaagtcttgctctgtcgcccaggctggagtgcagtggcacagtctcggctcactgcaacctctgcctcccgggttcaagggattcccctgcctcagcctcccgtgtagctgggattacaggcatgcaccaccatgcccagctaatttttgcatttttagtagagacaaggttttaccatgttgttcaggctggtctcgagctgctgatctcaagtgatccgccggcctcagcctcccaaagtgctgggattataggcgtgaaccaccacatccagccaagcccaggagtttgagaccagcctgtgcaacatagtgaaacctctgtctcaatgtttaagtaataaagtttttattttttattttattttattgaggcagggtctcattctgtcacccaggctggagtgcagtgatgtgatcccggctcacagcagtttaaaaatccctggctcaagcaatcctcctaccttggcctcctgaatagttaagactatgggtgcatgctaccacatcagctaactttttattttttgtaaagaagggatcttgctatgtcacctaaactggtctcaaactcctaggctcaagcaatcctcctccctcagcctccccaaatcctgggattacatgcatgagccaccacaccagccaggaataaagttttaaataagtaaatatgtttttaaaaagaataaacttgccgggcacaactttaatgtttattaaagtttgaggagtccaattctagcacaaaaaatatatataattttaaaaaacagtaaattgtaaatgctttcaccacaaaaatagattaattagcttgatttaatcatccccccaatgtaaacatgtatcaaaacatcacattgtaccccataaataaacacaattattatttgtcaataaaaagtttttagaagtagctgtgggccagcagtaatgctaaggactggagggccacgaaaataattttgagtgtcctgggagcatcacttttcaatatgacaactaaaaaaaaaatctaaactaccaatgtaaaatatttagcttattccagcaaataggagaggtagaaaaatgaaactaagtaaaaatgcaaaacaaacaaacaaacaaaacccagacatttggttttcagggagaaaaaaaaatcagcttacctccagtggaatctggcataaattagcaagttgattgatttctgatgcctgtggtcttttcttctgaaagggactgaaaatgaaaaggcgtgtatactgaaaagctacactaatgactaaaacttaatcggccctctacccgctgtattccgcatcataatccagtcaagaaacaacccaaaacactcacttcctatcaaaagccccacctgatcctatcaggccacatcaaaatttcaattcccaattctttcctcgacttctccaaaactgaatgaactctcataaaaattgtgattgtgaaagcttaattttcaaatctgcccaatcagtttccaatggaattttttttaagttcatgcaagtaaaaattttttaccttaactttgaaatagaaagcatggaaaacattatccaaatgtcagaggatgaaaataaattaaaacaacaaaaattggctgggcacggtggctcatgcctgtaatcccagcactttgggaggacaggagttcaagaccagcctggccaacatggggaaaccccgtctctactaaaaatacaaaaattagctggtcatggtggcacgtgcctgtaatcccagctacttgggaggctgaggcaggagaatcgcttgaacccgggagacggaggcttcagtgagccaagatcgtgccactgcactccagcctgggcaatgagcgagactccatctcacgtctcaaaaaaaaaaaaagaaaggaaaagaaaaaagaaatagggccagcggaggtggaacaatgccttaaagtgctctccgcccgacagaaagaattcaggctccaacctccaactggcaaaatctcttcagctgtactaatactctcaaaatgagatcaacatgccaatccatccccaccctagtctgggtgttgaatttaaacacaggctacatgcccttgcctgcagacatggagaccttccaaaattgagcgtccaactgaattccaagagattaaaccagacttcatgggacaggatgcaccagactagacctcctcccaggagaagaggtatccaaagatcgtattagcaaatgacccttggcggtgtgcggtggctcaagcctgtaatcccaacactttgggagactgaggcagacagatcacctgaggtcaggagttcaagaccagcctggtcaacatggtgaaatcctgtctctactaaaaatacaaaaattagctgggcatggtggtacacacctgtagtcccagctactcagctactcaagaggctgaggcagaattgcttgaacccaaaacacagaggttgctgtgagctgagatcatgccactgcactccagcctgggcgacagagggagactccatctcaaaaaaaaaaaaaagaaaaaaaaagcaaaatgacccagccagcctgaatcccagccgccgtgtcggactactatagtcccagatacttggaaggctgaggtgggaggatcaattgagcccaagaggtcaaggctgcagtgagcaaggatcttgccactgcattccagcctgagagacagagcaagcctgcaggtgaacggaaaggggtggagtgattttatatatatatatatatatatatgtatatatatatatatatatatatattttttttttttttttgtctgagccgctgtgcctggccttttttatttttttttagagacaggctggtctcaaactcctggccccaagtgatcctcccatcccagcctcccaaagtactggtattacagatgtgagccactgcagttggctcaacagcagattttcaatgtagatgaaaaagccatctattggaaggagattccatctaggatttttatagctagagagaagtcaatgcctggcctcaaaacttccaaggacaggatgattctcttacatgaaactaatgcagctggtgactgaatttaatctaatgctcacttaccatttaaaaaattttaaagcctctaagaattatgctggccaaatgcggtggctcatgcctctaatcccagcaatttgggaagccaaggcgggcagatcacttgaggtcaggagttccaagccagcctggccaacatggtgaaaccccatctctactaaaaatacaaaaaaattagccaggcatggtggcccgtgcctgtagtcccagatactcaggaggctgaggcaagacaatcacttgaacctcggaggcggaggctgcagtgagccgagatcacaccactgcactccagcctgggtgacagagtgagactgtgtctcaaaaaacaaacaaagaaaagaattatgttaaatctactctatctgtgctctataaatgaaacaacaaagcctgggtgatagcacatttgtctacagtatggttttgattattttaagcccactgttgagaactatttctcagacaaaaagaaaaagattcccttcaaagcattactgctcttcagatcccaggtgttaagccagtaaacacaataaataaataaataaataagtaaataaataaataactgctcatcaaacctaaacacaaaaatagaaaaataataaaaaagcaaaagaccacacaaaaacaaaatatcactgctcattgaaaatgtatcgggtcactcaagagctgatggatgaatcttaatttcagttgaagaaaaaaactctgatggagatgtacaaggagatgaatgttgtttgcatgcctgctaacacaacatccattctgcagaccgtgggtcaagaagtaattttgactttcaagtcgtgttatctaagaaacacatttcataaagccatttctcccatagatagtgaatcctctgatggatcggggcaaagtccattgaaaacctccatgaaacagttcatcattctaaatgccattaagaacatttgtgattcatggaaagaggtcaaaatatcagcatgaacaggatttggaagaagtggattccaaccctcatggatgactttgaggggttcaaaaattcagtggagaccaggcacatgacttatgcctataatcacagcattttaggacctaaagtgggacgatcacttgaggccaggagtttgagaccagcctggcaacatagcgagactcccatctttatttttaaaatatatattaataattcaatggaagtagtgactgcagatgtagcagaaatagcaagacaactagaattggaagtggagcctgaagatgtgactgaatttttgcaacctgctggtaaaacttgaacagatgaaatttttttttaattaaaaaaatgttttaaatgaaagaccctttgagaagtgtctgttcatgtccttcacccactttttgatggggttgtttgtttttttcttgtaaatttgtttgagttcattgtagattctggatattagccctttgtcagatgagtaggttgcgaaaattttctcccattttgtaggttgcctgttcactctgatggtagtttcttttgctgtgcagaagctctttagtttaattagatcccatttgtcaattttgtcttttgttgccattgcttttggtgttttggacatgaagtccttgcccatgcctatgtcctgaatggtaatgcctaggttttcttctagggtttttatggttttaggtctaacgtttaaatctttaatccatcttgaattgatttttgtataaggtgtaaggaagggatccagtttcagctttctacatatggctagccagttttcccagcaccatttattaaatagggaatcctttccccattgcttgtttttctcaggtttatcaaagaccagatagttgtagatatgcggcgttatttctgagggctctgttctgttccattgagaagacatttatgcagccaaaaaacacatgaaaaaatgctcatcatcactggccatcagagaaatgcaaatcaaaaccacaatgagataccatctcacaccagttagaatggcaatcattaaaaagtcaggaaacaacaggtgctggagaggatgtggagaaataggaacacttttacactgttggtgggactgtaaactagttcaaccattgtggaagtcagtgtggcgattcctcagagatctagaactagaaataccatttgacccagccatcccattagtgggtatatacccaaatgactataaatcatgctgctataaagacacatgcacacatatgtttattgcggcattattcacaatagcaaagacttggaaccaactcaaacgtccaacaatgatagactggattaagaaaatgtggcacatatacaccatggagtactgtgcagccataaaaaatgatgagttcgtgtcctttgtagggacatggatgaaattggaaatcatcattctcagtaaactatcgcaagaacaaaaaaccaaacaccgcatattctcactcataggtgggaattgaacaatgagatcacatggacacaggaaggggaatatcacactctggggactgtggtggggtggggggaggggggagggatagcattgggagatatacctaatgctagatgacgagttagtgggtgcagcacaccagcatggcacatgtatacatatgtaactaacctgcacaatgtgcacatgtaccctaaaacttaaagtataataaaaaaaaaatagaaaaaaaagaaaaaataataaaattacaattcatgtttccataaaaaaaagaaagacctcatgaagcgggcagatcacgaggtcaggagatcaagaccatcctggctaacacggggaaaccccgtctctactaaaaatataaaaaattggccgggcatggtggtgggcgcctgtagtcccagctattagggaggctgaggcaggggaatggcgtgaacccaggagacggagcttgcagtgagcagagatcacgccactgcactccagcttgggcgacagtgctagactccgtctcaaaaaaaaaaaacttgacctgatgaggaattgcttcttatggataagcaaataaattgtttttttgtttgtttgtttgttttttgagactgagttttgctcttgttgcccaggctggagtgcaatggcgcgatctcagcttaccacaacctctgcctcccaggttcaagcaattctcctgcctcagcctcccaagtagctgggattacaggcatgcaccaccacgcccggctaatttttttttgtatttttagtagagatggggtttctccaggttgaggctggtctcgaactcctgacctcaggtgatccgcccacctcggcctcccaaagtgctgggattacaggcgtgagccaccgtgcccagccttaaagtgtttttttaaaggtactcaaatatgtcaattttattgtttctctatgtgcacatttatttgctactgaaaattgcaaaagcagtacatcatggcttcttattgcaatgcatcctcccacctcagcttcccaagtagctgggaccacaggcatgtgccacttcacctggcaaatttttttgaaaaatttttttgtagagatggagtctcgccatgttgcccaggctggtcttgaactcttagcctcaagcaatactcctgccacagcctcccaaaacgctgggattacatgcaatagccaccatgcctggcctacttcaagttcaaaaatttaaaccaaccttcatcccagtgtcttcacaaatgctcagcaaagaaaattcctaagacaattcagggacctctcataaccttactgagagacgttaataaagaaccttagtaacttgactctcaactctactaccaacccttcccctctagcagaagtttcaccccaacaacaggatagaagagaaacaatcttccaggacatcagagatggcttgccttacaggaggaaattagtaagaacattgctctctgtggggaaagaaaggatggtaaaaatcgagatacctattaatagattttctcagcttgaaagagaactgacactaggcttaagggagcgcagaatgaatcaagaagtgaaccattcaaatgtggctgcagtttttgtgtgtatcacagatgggatccttctgagaatgctagaaaagggaattatgacacagagcctattcagccataaacattatttttgtactttttctttcttgctggtaattttttcctattcttttgagatggagtctcactctgttgcccaggctggagtgcagcggcatgatcttggctcactgtagcttccggctcctgggttcaggcagttctgcctcagcctcccaagtacctgggattagaggcgcccaccactacgcccagctaatttttatattttgagtagagatgtggtttcaccatattggccaagctggtcttgaactcctgacttccagtgatccacccgcctcggcctcccaaagtgccgggattacaggtgtgagccaccacgcccagccttcttgctggtaattttttatatagtgggttaagaaagctactctatgctaggatagactatcgcaatatttttgatatctttttctgtgatatctttttctcatacattttccttcctacaatgacactggtaacttataaggaatctgtgtagtttgaatgtatttgaataatttcaatataccttagtgctactctttgatttaatccctaaagcaccaataggtcctaaatattctcatgtgttttagaagcctgaagtcagtgagaaaaacccacagagagcaatgtttttactaatttcctcctgtaagtctagccacctctgatgtcctggaagattgtttcttttctatcctgttgctcgggtgaaccttctgctagaggggaagggttggtagtggagttgagagtcaagttactaaggttctttagtaacatctcacagtagagggtatgagaggcccctgaattgtcttaggaattttcttcagtgagcatttgcgaagactcggatgaaggttaggttaaacttttgtcatgggtccattggcaggctagtcacaagtgcctcctggatctttgggtcctggcggaaaacgatgccagactctcaaattgccacaaggtagcctggaaagaacgccacagtccagaaggagcctcgaaagtggtttcatgaggtggaatttactcctggtgaagatgctgtgaacgctgtttaaactacaacagaggatttacaatattgacgcacgtagttaagaaagcagtggcagggtttgagaggattggctccaattttgaaagaagttctattatgggtaaaatgctatcaaacaacatctcatgttccagagaaatctttcgtggaaggaagcgtcagttaatgtggtaaatttcattgttgttttaacaaattgttacaaccacttcaatatttagcaaccaccacccttatcagccagcagccaatgacattgaggcaagactcctcaccagcaaaaaagattacgactccctgaaggctaagatcattattagtatttttagcaataaagtatttttatataatttctttttaaaaaataatggagcttcaaataagggcatcaggtattttttcttttaatagatggggttttgccatgttgtccaggctgagctcaagcaatccacctgcctcggcctcccaaagtgctgggattacaggcgtgagtcaccccacccagccagcatcaagtgttttaaaattaaagtatgtgccttgtttcctagacataacaccattttacactttattagactacagtgtagtgtagtgtaaatgtaacttttttttttgagagggagtctcgctcggccacccaggctggagtgcagtggcgcgatcttggctcactgcaagctccgcctcccaggttcacgccattctcctgcctcagcctcccgagtagctgggactacaggcacctgctaccatgcccggctaattttttgtaatttttttttttagtagagacggggtttctccacgttagccaggatggtctcgatctcctgacctcgcgatctgcccgcctccgcctcccaaagtgctggtattacaggcatgagccaccgcgcccggccataacttctttttttaaatagagacaggatctccctatattgcccaggttgacctcacaactcctggtctcaagtgatcctcccccttccatgtcctaaagtactgggattataggcatgagccaccacacccagccaatgtaactttatattcacaaggaaacaaaaccatttttgtgactcactttatagcaatatttgctttattgtggtgggctgcaacccaatccacaatatctttgaggtatggctgtactttctaagtgtttcctgagtcagcctactttttctccattttttggtcattattctatccggttttttttttgttttgttttgttgttgtttggaaacaagaacttgctgtgtcgcccaggctggagtgcagtagcacgatcatagctcactgcagcctcaccatccctgtgttcaaaccattctcctgcctcaggctcctaagttgctgagactacagatgcacactaccacacctggctcatttttaaaaaattgtttgtagagatggggtctcatcatgttgcccaggttgatctggaactcctggcctcaagcaatccttccgcctcagccttctgagtagccctgatcaatccattgttgaagaatacatggatgttactttgcagtctgtcatcctgaatttgtgttcacttgacattgcctaattattagtttcagcttacccactttttgtcactaacacgcagaagagactgtggccttcttactgtatcatatcaggaagcatctcacattggtttgtgccattactggtgcagtgactttcagccacttggttaaggtggagttggccatatttctctgctgcaaaattactgattttccttttgtaattaataagtgtgtgtgagtagattcttttgagatgaagtatatatcttgttcttccttgaacttaaaggtttttttttaagtgaaagcaaatttgttaagaaagtaaaggaataaaagaacggctactccataggcagagcagtgtcactttaaggttatgacgtcaagtgatttttgtacaaatcaataattactgtgatgattgaaaaaagattattaccaagtttattttcattgtctcaaggtcttctgaactctggatctaggctgtgtcaacagggtagtgtggtaccccctgtacccgtctctgcctcctacagtccttttcatttattttgtttttttataatagaggcagagtcttgctatatgttgtccaggctggtttcaaactcctgagctcaagcaatcttcctgccttggcctcccaaagtagtgggattacaagtgtgacccaccacatctggccaagtcctttaccatcttcagaaggcttagcttgcagtttcagcagaaggatagactcccaggaagaccgtgagacagatttggggtccagttgatattatcaagtacactgaatttgactgtgttcaccacgttctggctccagagaaatgagagtcactagtgaagttggtgccattttgtgtatcttctgcacctaaggaggaaaaaagatagaggaaagaatgtaagagatcagcttatattcacaaacatggacgtcagccttttcccaccttttctttttttttttttttagacggagtctcactttgtcgcccaggctggagtgcggtggcgcgatctcggctcactgcaagctccgcctcccgggttcacgccatgctcctgcctcagcctcccgagtagctgggactacaggcgcccgccaccacgctcggctaattgtttgtatttttagtagagacggggtttcaccgtgttagccaggatggtctcgatctcctgacctcgtgatccgcccacctcggcctcccaaagtgctgggattacaggcgtgagcctccatgcccagcccccaccttttcaatccaatatggaacctactacctcctgggaaagccatgcccccgctgcccctggcagaccacacctgaggattcattcctcctctcactcaatcacaccttcaacagaagtgtattgagcgtttcctttgtaccaggcactggggatacaacagtgaatttgtatccatggggttgctggaatccagttggaaagtgggcagtggattcttcagaaggttcataggcctgggaagagtctttggggactgtgagcaaccccatggtaccgtggagcacttgagtggggatatcctccacctcccaggaggagctgtcggctccaccatgacgaagcactggacatccaagggctccgcttgtgaaccacattggaaacaacaggctagttaccttgcagtccctcaggaatcttgccctgctcttcttgttctaaggacgccacaggttccctttttctctggagaagtaatctagatcttcgattttggaaccaaatctaagtggtaagacaaagaaacttaatttaaacaaagaatgttgtgtaaaactcatgattgctttcttctcttttttcttttctgttttttgagacagcggtctctctcagagtagctagtgccacagctgtgcatcatcaccttaggctaacttttaaactttttgtagagacgaggtttcaccacgtggcccaggctgatcttgaacttctgagcacaaccaatcctcccaagtagctgggactagaggcacacttgactgtgcccaacccaagatagatagatagatagatagatagatacttttttttttaatacggagtctcactcggtcacccaggctggagtgcagtggcacaatcttggctcactgcaacctccacctcccaggttcaagcaattctcctgcctcagcctcccaagcagctgggattataggcgccaaccaccatacccggctaatttttgtatttttagtagagatggaatttcaccatattggccaggctggtcttgaactcccgacctcaggtgatccacccacctcagcctcccaaagtgctggcattacaggcgtgagccaccgtgcccggcccaacattattaacattttatgacatttgtgagagtctataaggcctaaagagaacacccaaaattctgaaactcacacccagtccctttgtgataggttttagatcctgaaagttcacaggtccacctcattacaataccggtgtttctctaaagtgacatgctacattgcagctcttccttctgcctgaaatttttttttctatctctttttcttcccctcagaaatgcccattttacttccaattcccagaatagagaatgtctaggaaaacattcttcatcccacaagacaaacttaatttctgttccttctttgtgcccatagattatacacataggcatgtaaaacttatgcatatatactcacataatttgaaatagcagttcatatatacttgtacgcacacactcacaaaaatccctcaccttccagcagctactatatttttgagacaaaatctcactctatcgcccaggctagagggcagtggtgcgatcacagttcactgcagcctcaacctcctgggctcaagtgatgctcctgcctcagcctctcgcgtaactgggaccacagccatgtgccagcacacccagctaacttttaatttttttcatagagttgtggtctccctgttcctcctgcctcagcctctaaaactgctgggattccagacatgagccgccgtaactggccacaactctttttattttgagacagagtttcgcccttgttgcccaggctgaattgcagtggcgtgatctcggctcaccgcaacctccgcctcccgggttcaagcaattctcctgcctcagcctccggagtagctgggattataagcatgcaccaccatgcccagctaaatttttgtatttttagtagagacggggtttctccatgttggtcaggctggtctcgaactcccgacctcaggtgatccacccgccttggcctcccaaagtgctgagattacaggtgtgagccactgtgcccagccacaactcttaatagtgtgaaaatggcagttaagtttcaacattggttttggaggagacaaacattcaaaccatagcaatcactacctagtacagtacctagcacatagtagatgctccgaataatgcaaaatgaaagaaggacagaatgaaaaatgaacacgagacgaggaaagtaaaacgaaagaaccatcagaactactaatgtgcattcatgtcctgcttacaggagggagcactggtttaaacgcacacacaccctacacagcagtctgacaattttattccatttcaagatgtgtcaggaatgaatcctcggacagactggtacatttctctgagctaaatgttaaatgtctaaagtggacctcataattttttttttcaagacggagtcttgctctgtcacccaggctggagtgcagtggtgcaatctctactcactgcaacctccacctcccagattcaagtgattctcctccctcagcctgccaagtagctgggacaacaggcatgagccaccgtgcccggttaatttttgtatttttgtagagatggggtttcaccatgttggccgggctggtcttcaactcctgacctcaggtgatctgcccacctcagcctcccaaagtgctggcattacagacgtgagccaccgcacccagcctggacctcataactctaacctcagggcataattagaagatctgaaggatacagtagacataaagacttcagtcaaataggccgggcacggtggctcagccctgtaatcccagcactttgggaagccaaggagggtggatcacctgaggccaggagttcaagatcagactgggcaacatggcgaaaccctgtctctactaaaaatacaaaaaatattagccaggcgtggtggcacacacctgtaatcctagctactcaggcagctgaagcacaaaaaccgcttgaacctaggaggtcgaggtggcagtgaggcaagatttcgccgctgcactccagcctgggtaatagagtgagaccccatctcagaaaaaaaaaaaaggctttagccaaatgcctggcttatatgcaatgttaactaatattcactcactcaacaacttctcattgggtgtcacgtgccacgcactgttcagggcccaaggaatacaacattgctcaagacagacagaaaataccagaaggggatgtgagattgagtcctgtgggcacctgggggtagaagccagcagacagggaacagctgtgaaagaccctgaaatgtgcccagcatgatgaggaactgcctgaggcccatgtggcttcccttcctgtatacctagatccctaggagatgggacaaccaccttcttatcactcacttggactcttgactctggaacaccgatttctttagcaagttcttctctggaatcaatcccaggatatgggtttttcataaatgccttgatgagagtgtgtaactgagaggcgctgtaggtggtacgacaccgtctggcttctctacctagggaaggcatggaaagatggaggggggcggtcaaggaatattgcaagggtccattcacatattcaaacacagaacccaaacttgtcactctccctccaatttcgatcccactgactcctcctgagaggatcttgtcccaggttccttccaggtggaaggttctagaggagacccaggatgatatgtctgggcttctggactccagtagaaagaaagtaggcaagaggccgggcgcggtggctcacgcctgtaatgccggcactttaagagactgagagggggcagatcacaaggtcaggagttcaagaccagcctgaccaatatggcgaaacctcgtctctactaaaagtacaaaaattagctgggcatagtggcgcgcacctgtaaatcccagctacttgggaggctgaggcggaagaattgcttgaacctgggaggcagaggttgtagtgagccaagatcaagccactgcactccagcctgggtgacagagtgagactccatctcaataaataaataagaaagcctgggaagagggcaggggagaacttctagggtacgatgaaccctttgccaccataagaccctgaacaggaggtcatcagggaggagacattcttttttcaaagtcgcagttggctccgccgtagagaagctctgctggggaacagaactaagagggttatttactttgaaactccacaccaggttgatcttgcccctggctctggcttgattctaaagtctcagcttctggtcttttctggaatccgtgcctagctcttcgattctgaaaccaaatctaagtgaggaaaagaaaaggagagaattacgtgttaatgtcatttaagctacatcactgcctgttcccaaagtgagcaattcttattgggcctaggcccaggattattacttacttctgtcacattctaccaagtccttttttttcttttttgagatagagtctcactttgtggcccaggctggagtgcagtggcgtgatctcggctcactgcaacctccacctcctgagttcaagtattctcctggctcagactcccaaggagctgggattataggtgtgtgccatcatgcctggctaatttttgtattttcagtagagatggggtttctccatgttggtcaggctggtctagaactcctgacctcaggtgatccacccacctcggcttcccaaagtgctgggattataagcatgacctaccacgcccagcccatctaccaactctttggtcaagacttggcattcacacccagggcaacattgtgtgacaccataatctctactaaaaacaaaaaagttaaaaaaaaaaaaaattagccggccaggtgcagtggctcatgcctgtaatcccagcactttgggaagccgaagcaggcagatcacgaggtcaggagttcaagaccagcctggccaacatagtgaacctcagtctttactaaaaatacaaaacaaaattagctgatcatggcggcaggcgcctgtagtcccagctacttgggaggctgaggcagaagaatcacttgaacttgggaggcgggggtttcagcaagccaagatcacaccactgcactccagcttggacgacacagcgagactctgtctcaaaattaaaaaaaattagctgtggtggcacatgcctatagtcccagctatctgggaagctgagggagggttgcttgagaccgggatttcaaggcttcggtgagccttgattgtgcccctgcactccagcctgggtgagacagtgagaccctgactcaaaaagatgaaaacaaaaataaaaataaaagattgggcattcagcatcttcacaatctgctgccaacatgatttgctctaattattaatatttaattggtaaatagctgctacaattattacatgtttaaaagccagctcaagtatctccttctctgaaggtacgcctacacgtgttctctcacctcctgtgagctcgctcatcctcagtatccacatctgtgaagtgaggctaagaccaacaccttcgtgggtttattgagggtcagttgagatactccctaccaagccctcagcacatgggtacatagtatgggctccgttaatggttctctctcctgcctttttacttccagtcctggagatattgaactttaacttacctggattctggactcttctgtattgatttctaaagcaagtttttgtttggtagcataacctgggtaaggcttttgattgaaggtattgatgaggattttcaactgttcttctgtgaattttgtgcgacagcgcctatgatttgtttttaccatctctgtaggaagattacaaaagaagaagcatgtaataggttaatttatatactcaaacttcaggttcaagctagtctctcacttcctcttcccaaatccactggaatccactccaggagaactaccctcatacaagtatggagctcttgaacacacaatggcgatttttcaacttctttagctcatctgaatgccatactaagaagtcagggatcctctgttttgaaaaaccattaaaaaccattgtgagccgggcatggtggttgacgcctgtaatcccagcactttaggaggtcaaggtggtcagatcatgaggtcaggagttcgagaccagcctggccaacatgatgaaactccatctgtactaaaaatacaaaaaattagccagtcgtggtggcgtgtgcctgtaatcccagctactcaggaggtggaggcagcaaaatcgcttgaacctgggaggcggaggttgcagtgagccgagatcgtgccattgcactccagcctgggtaacagagtgagactctatctcaaaaaaaaaaaaaaaaaaactgggcgcggtggctcacacctgtaatcccagcactttgggaggccgaggcgggcggatcacaaggtcaggagatcgagaccatcctggctaacatgatgaaaccccgtctctactaaaaatacaaaaaattagccgggcgcagtggcgggcacctgtagtcccagctactccggaggctgaggcaggagaatggcgtgaacccgggaggcggagcttgcagtgagccgagattgcgccactgcactccagcctgggtgacagagcgagactccgtctcaaaaaaaaaacaaaatgaagtaaaataaaaaataaataaaaataagaatatgtatgtcatgaaaatgccaataattttttttaaaaaacaatgtgttctgttcatatggattagaaacaatctaagtcaagaatgcatgcaatatgtcattgtagtgatgaaaccatagaaacgaagagtttgtgatacaaggaccatttcaacccctttcagtttttcaggtcaaaattccttggtattttatttttattggcatatattttatttttattatttttattttttcaggcaggatctcactctgttgcccaggatggagtgcagtggcgcaatcatggcacactgcagctttcacctccacaggctcaggtgatcctcctacctcagcctcctgagtagctgggactacaggtgcacacccccacacccagctaatttttctactttttgatagagtttcgccacgttgtccaggctggtctcaaactcctgggctcaaaagcgattccccagccttggcctcccaaagtgctgagattacagatatgagccaccacccctggccggagcatattttttttactttgacctccattgctcaatagcaataacaggcaaacagtaacagtttccaaggtatttttaaaaacaccacagggaggacaaaattagctggaaaaagaatttcatactttcagtggaattttccaataggaaaaaaaataccacatcacataatttgctggataggacatctccttgaaataaccaaatctggaaagcattttggaagataccatttcgtaacagaattagacttagtgaattgagataagaagaaaatttactagagatgctagaagttcagttaaaagaccaacagcttttttgtttgatctttgaatgcttgcccttgtcttcagtttcacacacctggtccattgttttgttttttgttttttgttttttgagatggagtttcactcttgttgcccaggctggagtgcaatggtgcagtctcggctcactgcaacctccacctcccagattcaagtgattctcctgcctcagcctccaaagtagctggggttacaggcacgtgccgccacgcctggctaattttttgtatttttagtagagacagggtttcaccacgttggccagactggtctcgaactcctgacctcctgatccacccaccttggcctaccacattgctgggattacgggtgtgagccactgcacctggcccctggtccactgtatttcactgaagggggaagtttcaacttttacaagctcaatgaattggctcatacaatccacctttgacattacccatcattcctcttgaaccttgacctcatcatacgcgacattccataccttgacctcatctccttgacctcatcatacgcgacattccacttggctttatatgttgcaatgtgtactcctgccatgatatctaacttccatctgacccccaacccggccaacttcttccttctccagagttttcacttgctcctccgtctacccacaaggctcttcacacgatgatggatgagatcaccttgctcaggtctcagcttgcacaccatcttctcagagtccctccctgaccctccggtctaaggcagtccacaccccatgctatgacctctcactttaccaccatgcttagctaagtttttgatgttttgtagagatggcctttccctaggttgcccaggctgtatgagactcctggcctccccatacaatcctcccacctcagccacccaaagtgctggaattacaggaaagagtcacatcctctctcttttttttttctttgagacagagtctcactctgttccccaggctagagttcagtggcacaatatcggctcactgcagcctcagtctcctgggttcaagtgattcccctgcctcagactcctgagtagctgggattacaggcacctgccaccatgcctggctaatttttgtatttttagtggagacgtggttttgccacgtaggccaggctggtctggatgatccacccacctcagcctcccaaagtgctgggattacaggtgtgagccaccatgcctggccaatttcttaaacttgtttaaagggtagttgtcacatggagtctgaaaacatatcaatgaacttttcttactgcgttatattaaaatacatttttgtcttacatttttttcaagtttccaacccattatcttacattttgaatggctcttttacctatcgatgattttgtagcctcttgcattgatcatttaaaataacagtttagactgggcgtaggtggctcacacctataatcccatcaccttgagaggccaggacaggtgggttccttgagtccaggagttcaagactatcctgggcaacatagtgagacaccatctaactcattctacaaggccagtattactctgatactcaaaagcaggcaaatagacacatcgaaaaaggacaatatccctaatgaacactgatgcaaaaatcctcaacaaaatactagcaaactgaattcaacagtaaaaagataattcctcatgaccacatgggatttatcccacggatgcaaggatgcctctgtaccccatacatatatacacttactatgcacccacaaaaattcaaaatcattggccgggcacagtggctcacgcctataatcccagcactttgggaggccgaagcaggcagatcacctgaggtcaggagttcgagaccagcctgaccaacttggagaaaccccgtctctactaaaaatacaaaattagccaggcatggtggtgcatacctgtaatcccagcaacttgggaggctgaggcgagagaatcgcttgaacccgggaggcagaggttgcagtgagccgagattgcaccattgcactccagcctgggcaacaggagtgaaactccgtctcaaaaaaataaaattaaaaataatttttttaaaaaaggctagatgactgtaggattttggtggaaacaaaaattttttttaagataaaaaatatttcaaaataataaaaatgtgaaaggctagttttatgctagcaattcaaataattacatacatccttcttttccagacaagcatcctattccagtatgaagcacagggtttgatgcatatgtccctttgtgttacacaggatattaaaaaggtgtaatcaagggttaaagtttaataaaatcaataattgttactgcttaaggacattcctaagtgaaaccactttttgttcttgcactgaaagtatgagggtaaccacagtaactaccagtacaatttggttatactggtttgatgtcctctgaggtaccagcagatttacccatcattgtttttgtatcatcagtgcaaaagaaaaatgtcttagtataattaggaaaattgtgtcaaccttacagttcctggaaagggctctggagctccacaggccatactttgaaaacaagtgccctaaaataaatcttctattcttccgtatatttgtaagtaacaccacccctttcaaaagaccacttcataagatttacatagacctgccctgataccttgagaaattgatcctctctgcttttgtaattaacctcagaaagccactcctaaatccattttgcttttcctcaacttctacatttctggagtaggaaaaaaaaaaaaaaaatatatatatatatatatatgtatatatatatattcattcttttgactgaattctaatttctaacactttaccttctccacacaacaaacattcacttccagaaatggctaggtaagtcctagtagaattaaccagaatattttcatctaatttttcaagtgttaaaaaattattaacgcctattaaaagccagaccctggccgggcacggtggctcacgcctgtaatcccagcactttgggaggccgaggcgggcagatcacgatgtcaggagatcgagaccatcctggctaacacagtgaaaccccgtctctactaaaaatgcaaaaaattagccaggcgtggtggcgggcgtctgtagtcccagctactcgggaggctgaggcaggagaatggcatgaacccgggaggcagagcttgcagtgagccgagatcgcgccactgcactccagcctgggcgagagagtgagactcctctcaaaaaaaaaaaaaaaaaagccagaccctattctaggcaccataaacaaaacagttaagatatccttgatctttaaggagctgaaagatatcaagcaaacaagcaaaagatgtagtgtatcagatgatgagtatttccacggcaaagaagactcaagtggcaagagtagagagtgcaggggtgaggtcacagttctaagtgcaatagttagggatgggctcactgagaaagtataacatgaacaaaggcttgaggcacattagagagtgagtaatgctgacgtttgagagacattgcaggaggtggggagaggccctgggctgggacgctgcctgtcctatttgacataaggcaaggaggccagaacatctgaaaaaaaagaataaaagggaagcagacgaggtcacagaccataccaagcgccacgttatctagggcacgatagggccaagtgcctttttgttgaaggttttgagcagataagtgacataatttaatttatgtatgtatgtatgtatgtatttttgagatggagtctcgctctctggcccaggctgaggtacatggcatgatcacggctcactgcaacattcacctcttgggttcaagcaattctcctgcctcagcctcccgagtagctgggactacaggcgcccaccaccacgcctggttaatttttgtatttttagtagagacagggtttcaccatgttagccaggctggtcttgaactcctgacctcgtgatctgcccaccgcggcctcccaaagtgctgggattacaggcgtgagccacggcgcccggccgccataatttaattaacagtttaacaacatcacatgaggtacagcgttgagaataggttggtggaagcagggagatcagttaggagaagactgcaataatctcatgcaatgggccaataatctaatgagatggaccaagaaatggtcagattccttaaatatttgaatgttaaagccatcagaatgtccagcctgactgtgttatgggggaaaaaatggagtcaggggtgttttctagatatgaggcatgacctggcacctcctgagctggagaaaacagtgcgaggaatagtttagatatgaacatagggaattcagtttttggaacacattgagtctgagatgcctgttagagacaagcaggcaattagatgaagtccaaagttcaggagaaaagttcaaacattctgtagagagaaatcaggaaagtgctttccagatctggaatccttgattccaaggatattttgagctctgaactttgtgatgtgtcccatagttgctctgttttagcatctgtctccctctcctttttttcttttccactccttcctcctctcttccttcctgaagctcaaatatgtcttatttagttcttgaatatctgtacctttctgaaattcccaatgctcaaatgcactgaaaacagcctattttcataatatcacatcagagaaaccggttttcccctatccagatacagttaaagtttaaaaatggaactctcacaacttctgacaagaccactgggtttttagccctactttttccccaaaccaacaaaagctcagtcaagcacaagggaacttactgtgtgaataggtgtcttcggccatgctggaagagagtcctgaaggctgagccactgtctgggagacaagtcactctgcgcagagactgggttttatatgcgtagccaggtggtcccgcccacttttttaaaccatttacataaatctctagttccacccttagtaattgtatcactccttagaaacatgtatcctccatctaaaaaggactagataggacccctttccgtcaattgatatttaataatttacaccagtgtataaattattaccaacccctacacctaagccatcacaagaagaacatttcggcccatgccaactcacatacacagagtcatgctccttggctcccccaacccccttgtgggaaaaaaattcgtcccaaatcactggaacctgaacagggagacaagcttgcaatagttgccaattttttaaaaaagaatatttttgagtactattctgcttacacatatttttcaatgcttattatatacatatagtcttttgtaaatggggtttttatgctctccacctatcttttgacatagtggcctctccttataaattaaaagtgttatttctaattagtatcacataagagtgaggctagtgagacaggaacaaaatttaaggtggtgctaaaaattctgtgatcaagataaatagtatttgaaagcaatgtatattttaagtaatgtaaaaagtccatcttaacaaaacataaagattgtaaataaaaagaagatcccaccctgcacgtgcacgaccctgcaagttatgcaagtgagggtacctgcgcattgaaaaaagatgtctcaccattgaccagtcattgatcagtcattgatcagtcttgagggaagctggctggtggctgtcactttttatagctgtaatctacaatagtgcaggataaaagggaaaattttattacatgtctatatttgtgtaattttttaactgttattaagagcacataaagaagtgatatgaatttcatttattgatatatttgactatccataaataaaatttggccagatatcaagccattttggagaaacaatttcgaaccaggaaaatgacatgaaataacatttaacaggaaaattttacactttatttaattaaaacaatgataaattgtttttcttttctgtatatgacatttcatcacaatattttttcaccaaatttgtctggaaatctagagcagaattttctgctgtttgtttatattgatgtttatattttgatgtaaattatatgtacatctacttgaacattagtattacaattataaatgtgctttaaattaattgacacaatattggatattcattataattatattatcattaaatatattatattaatatataatattaataatataatcttgatataccatataacagatatattacatattatatttactccagttaaatattatatttactttttagctttattgaggtacagttgacaaaaatgatatatatttaaatatacaatttgaattttgatatacacatataattgaatcccagattcaattaccataatcaaatcaagctgattgatgtatttaccacctcaaaccacaccctttgtgtgtgtgtacatatatattacattatattatatttactccaattattgtatttactttttagctttattgaggtacagttaacaaaaatgatataaatgatatatattttaaatatacagtttgaattttgaaatacacaaaagatataattaccataatcaaatcaagctgattgatgtatttaccacctcaaaccacaccctttgtgtgtgtgtacatatatattacattatattatatttactccaattaaatattgtatttactttttagctttattgaggtacagttgacaaaaatgatataaatgatatatattttaaatatacagtttgaattttgaaatacacaaaagatataattaccataatcaaatcaagctgattgatgtatttaccacctcaaaccacaccctttgtgtgtgtgtacatatatattacattatattatatttactccaattaaatattgtatttactttttagctttattgaggtacagttgacaaaaatgatataaatgatatatattttaaatatacagtttgaattttgaaatacacaaaagatataattaccataatcaaatcaagctgattgatgtatttaccacctcaaaccactccctttgtgtgtgtgtacatatatattacattatattatatttactccaattaaatattgtatttactttttagctttattgaggtacagttgacaaaaatgatataaatgatatatattttaaatatagtttgaattttgaaatacacaaaagatataattaccataatcaaatcaagctgattgatgtatttaccacctcaaaccacaccctttgtgtgtgtgcatatatgttacattatattatatttactccaattaaatattgtatttacttttttttttttttgagacagtgtttcactcttgttgcccaggctgaagtgcagtggggtgatctcaggtcactgcagcctctgcctcccagattcaagtgattctcctgcctcaggctcctgagtagctgggattacaggcatctgccaccacgtctggctaattttttgtatttttagtagagatggggtttcaccatattggccaggctggtctcgaactactgacctcaggtgatccacctgcctcggcctcccaaagtgctaggattacaggtgtgatccactgccctgggccttgtatttactttttagctttattgaggtacagttgacaaaaaagatacatattttaaatatacgatttgaattttgatatacacatataatatgatatggttaccataatcaaatcaagctgattgatgtattaaccacctcaaattataccctttgtgtgtgtgtgtgtgtgcggtcagaacactttttaaaaaaaatatccttttctcccccatgcagaagaacacttaaggtctatccttgtcgcaaaaaataaaaatctatcctcttagcaaatgtcaagtagtattgtttttttcatttctgatcatccaatttaaaatttttttttctaatttgttaactatgtcacataatgtcacaatgtacatgtcaaataacgtcactatgtaccttaaatccccaaaacttatcttgcaaaactgaaaatttgtacttcttgaccaacatttccccatttccccttcactcaagcccccggcaaccaccattttactctctgcttctatttttgatccaacctcactgtttgtgtccacgctccttaattttcttggtcatgagaccacgagcttagataacaccttagacaatgagaccagtgaccctgacctgtttcagtttagttatttaaaatatttttctttcttttttaaattgtatttatttatttatttgttttgagagggtcttgctctgtcgcccaggctggaatgcagtggtgcaaccatggctcactgcagcctccgactcctgggctcaagcgatcttaccccctagggctccaaaagtgctctgacagtaaatgcatgagctaccatgcccagccatcaaattttcaatcattataaatcttagagctggaaataatatctcattgttttatttttaatttgagcgctagcgtgcttgaacacttttaatcaaatgtatttgccatattttatttttcttttattagctttcagattctttgcttctttcttaggtagaacatttctttgagacttaaatattatgctgcatttgtcctatgtcctgcaagtgttttcttaattcagtattttaaaataatattttgtttttatgttttttgtatctttatagcattcttctaaattggatctatgtttattttaattgtctagtcaaagtactgacaaggaggagtgaacttcctgaaaacggagaacaagatgtgatgccttttagtaaatgtttaccaaaagacacaggattccatttccaattccatatcgagaacctttaaaattgtacataaaaatgcaggtgaagtcgtggagaagggaggccaacagtgcacacaggtagtgcctctggggaagaatcagaagtcatcctgcatcctaaattcctgacctgacttttctgcagggcgagtatctgacctgtgctacaccatcagcaacacaaagaaaacttgatgagcttttatttccttttatttgtatgtttcactccagttttcaattccgtgccctcaaaagcccggatatcatcaccggtacctcttttaagcttcacctctctgtgcggctccgcaagtatgttggtctccctgagagagtggggcctgcaacctgctgggcgcaggcgccttgagctgccacgtctgcccttttaccggcttgggtgcaggcaagggaaatgcgtccccgggccggggggcgcgagcgggggtccggggccgcgagctggggtccggggagcgcgagcgggggtccggggggcgggggccgcgggccgcgaggggggcgggggccgcgagggggcggggcgtgcgagggggcgggggcgtgcgagggggcgggggcgcgcgagggggcggggcgcgcgagggggcggggcgcgcgagggggcggggcgcgcgagggggcggggcgcgcgagggggcggggcgcgcgagggggcggggcgcgcgagggggcggggcgcgcgagggggcggggcgcgcgagggggcggggcgcgccgggctcgtcctctccgcggcgctcagtggcagcagggagggccggtgagatgccagagcaaggtagggtcctgtatttggggaccgctgacgtttgggtccccctcccgcggctgttagcgctgcgtggcccgagacctgcggtcgggcggggattaaggctgctttccggagggccccggccgcgtggtcgccctgccagagcggttgatgtcaggcagtgctgggaggcgttgctctccgggttcgcttctctcctgttgtcctaactctgcatctctcccgggtgaatcacagagctgtaaactaaaaatcaaattctaagctcccagccaactgaatggacccctcctctcagctaagagcatggcaaacttaaccggaaacactagttcggccgcgataggaaggagatgggacatgcctcattttaccctcctctctttgaaattcaggcacaggtcgggcgcggtggctcatgcctgtaatcccagcactttcggaggccgaggtgggtggatcacatgaggtcaggagttcgagaccagcctggccaacatggagaaaccccgtctctactaaaaatacaaaaattagccaggcgtggtggcgggcgcctgtatcccaactactcaggaggctgaggcaggagaattgctttaacccgggaggtggaggttgcagtgagccgagatcgcgccactgccactccagcctcagcaccagagcaagactacgcctcaaaaaaaaaaaaaaaaaaaaaaggaattcaggcacagctgaccagtattaacattaaaacaatttttttttagtatcttcatgctaaaggggtaagtagaaattgcatgtagcctcccatcagtttattccaaatagcaaacatttaccaagccctgagttattaactacgtattttctttttgtaaaccttacaattgagcaggcaagtaataacattatctccatatttttaatgtgaggaaactgaggcccaggaagacgtgtaatttgcccaatatcaggtattcagtatattggagatttgaaggacaagttatttattttgaaaaatgtataccttttccaaagttccaacaataattcaatgaacacatttattttgccccagaattgccaatgatgttatgtcctataaggaggcacctaagtatacagtttgtccatttgggagatttggattttgactacttggttaagatggtatctactagatctctccactctttcttctttgtaattaataagtaatctgtgggtcaattctttgcaatgtctgaataatattaagtccccccacttcagcctctagttttagcctctgttgatgattcttccctgaatctgtgatcactgcttgtggggattctatttctattacttctttacattttatacttataagttgacactcctgtaaagaactttacccatcccattcttttttcttttctttttttttgtttttgagaaagagtctcactcttgtcatccgggctggagtgcagttgcgcgatctaggctcactgcagcctccgcctcccgatttcaagtgattctcctgtctcagcttcccaagtagctgagactacaggcgtgtgctaccacacccagctaattttgttttttttgggttttttttttgtttttgtttttgtttttttttagtagagatggggtttcaccatgttggccaggctggtctcaaactactgacctcaggtgatccacccccctcggcctcccaaagtgttgagattacaggcgtgagccaccgcgcccggcccacctcaggtgatccacccctctcagcctcccaaagtgttgagattacaggcgtgagccaccacgccgggcccacctcaggtgatccacccccctcggcctcccaaagtgttgagattacaggcgtgagccaccgcgcccggcccacctcaggtgatccacccctctcagcctcccaaagtgctgagattacaggcgtgagccaccgcgcccggcccatcccatcccatccattttaagttagttaattattttagaagccacatggagtggatgatttttatctgcggcattataatccatttatctcattgtattggtgctcacactacccagcattagcctctccaaactcaagtaggcttgactttcttatttctatcacagagctcctgaaacccttggaatttcctgtgtgttgaaatgtcttttgttatttttaatgactttttgatcacatctcagtttataccaatgagatggcttagggtggagaccctagacagcctcaagatgaagctggtcaccagaaagattagagagttggaactttcagtcctacccaccaacctctgtgaagtggaaagggtgggatggcttgacatgaagctctataaaaactcttggacaacaagattttagctttccagattgctgaacacattcagtgttcctggagagggcatggaagctccacacctcttctcacataccttgccctgtgtatcttttctgactgtttgtttgtatcctttgtgatatcttttattataaaacagtaaacataagcaaagtgtttccccgagttctatgagccattctagaaatgagttctagggggttgtgggaaccccaattctaatgtagttggtcaaaagcacaggccacaaccaggtgattgtgactggcatctgaagtgaagggcaattctgtgggacttagtcctcaacctatgggatgtgacacttccttcaagtagatagtgtcagatttgaattataggacacctactggtgtctcctggaaaactgggatggatgaaaaaacctccactcatttggtcacacaaatgttctgttttgagtgagttgaaagaaaagaacagttagtttttttgctttagatgtggtgtcagaaatgggatgttgaatgattgtgtaagagtgggagcacttggcagagaagtcaaagatggcggctgtagctgctgttcgctggctggggctctgcagcaggcttgaccagccactgacgggtcagccagcaggtctatgtgaacaagcacacagctgagattttattctggaagtgcaaccctctcaaatattgaaggaactgatataacagggattgaagaagtagtaattccaaaaaagaaaacttgggataaagtagccgttcttcaggctcttgcatccacagtaaacagggttcccacggctgtaccttgcgtgtttcaagataatccttacctcataccaacatcctcttcagaatctcgttcatttttactggcaaagaaatccggggagaatacggccaagttcattattaattcatactccaaatattttcagaaagacatagctgaacctcatacactgtgtttaatgcctgagtactttgaacctcagatcaaagacataagtgaagccactctcaaggaatgaatcaagctcagaaaagtcaaagtctctgtggacatgtttgatgagcttttgcaagcaggaaccactgtgtctcttgtaacaacatatagtctcttggatttattgtgttactatggtgaccaggagccctcaactgattatcagtttcaacaaattgaacagtcagaagaattggaagaggaaaataataagaggtctaggaggaaagctggtgatcaatttggagttacctggtgagcacaaaacaacgctgagagaatgttttctctaatgccagggaaaaatgcacattcctattgcacagtgatccgaggaatggtgaagcatcaagcttatgagcaggcattaaacctgtacactgagttactaaacaacagactctgtgctgatgtatacacatttaatgcagtgattgaagcaacagtattggtgataaatgagaaatttgaggaagaatggaataatatactggagctgctaagacaaatggttgcacagaaggtgaaaccaaatctacagacttttaataccattctgaaatgtctccgaagattttatgtacttgcaagattgccagccttacagattctatgtgaaatgaaagccatcagactagaaccctcgcttgcaacatatcaccatattattcagctgttttatcagcctggaaacccttcaaagggatcatctttcatcatctatgatataatgaatgaattaatgggaaagagattttcccccaaaggacctggatgatgataagctttttcagtcagccatgagagtatcttcatctctcagaaatctagaacttgcgtaccaaatacatggcttttttttttttttttttttttttttttgagagagagagtctcgctctgtcacacacgctggagtgcagtggtgcaatctcgcctcactgcaagctctgcctcccgggttcacgccattctcctgcttcagcctcccgagtagctgggactacaggtgcccaccaccacgcctggctaattttttttgtatgtttagtagagatggggtttcacagtgttagccaggatggtctcgatctcctgacctcatgatccgcccgtctcggcctcccaaagtactgggattacaggcgtgagccactgcacccggctacatggccttttaaataccagagacaactgaaaattcattggacctgataaacggcataattcctattattccatgttcttcaatttgatttgtctaatggaacgaattgatgtcaccttgaagtggtatgaggacctgataccttcagccttctttccccactcccaaatgttgatagatctccgagcattggatgtggccaactggctggaagtgattactcaaatttggaaagatagtaaagaatatagtcacactttctgcaacaacctgagagaagagatcctgacactcatggcaatggataagcacccaccagagcttcaggtagcatttgctgactgtgctgctgatatcaaatctacgtatgaaagccagcctgtcagacacactgctctgaattggccagctatctgtctcaactgtagagctgtctttttttttttttttttttttttttgggacggagtttcgctcttgtggcccaggctggcgtgcaatggcatggtctcggctcactgcaacctctgcctccgaggtttaagtgattctcctgcctcagcctcctgagtagctgggattacaggcgtccaccactatgctggctaatttttgtctttttagtagaaacagggtttcaccatgttggccaggctgtctcaagctcctgaccccaggtgatccacctgcctcagcctcccaaagtgctgggattacctacatgagccactgcgctcagccagctgtcctctttttaatggctgggagaatccaggaagcctggaaaatgttggggctttttaggaagcataataagatccctagaaatgagttgctgaatgagtttatggacagtgcaagagtgtctaacagcccctcccaggccactgaggtagtagaggtggctcagcttacctatttgtgagggcctcacccagagagtaatgactgactttgcaatcaaccaggaacaaaaggaagccctaggcaacttcactgcattgaccagtaacagtgatactgacagcagcagtgacagcgacagtgacaccagtgaaggcaaatgaaagtggagattcgggagcagcaatggcctcagcgcagctgctggaatcacacctgagagcgagatatgctaatatttaacactgttacaaagaagacaagatacagattgggtgaatttgttactgtgagatacagtcagtacacagctgatttatgtagatttaagctcctaatttgcaacttaataactgtctattaatacaccattaaaggtttagcatttaagtagcaacatggccgttttcaggccaggcgcagtggctcacgcctgtaatcccagcattttgggaggccgaggcaggcggaccatgagggcaggagatcaagaccgtcctggctaacacggtgaaaccccaactctactaaaaaatacaaaaaaaattagccgggcgtggtggcgggtgcttgtagtctcagctacttgggaggccgaggcaggagaatggcgtgaacctgggaggcggagcttgcagtgagccgagtttgtgccacggcactccagcctggacaacagagcgagactccgtctcaaaaacaaacaaacaaacaaaaaacaaaaattgccgtttacagacacatggtgaggtccatcgctcttgtcatcaggataagcctgcaacctacaatgttggtgcgctgacctcgtgctgccgtcctcgtgtgactgccctctccctgctgccgtcctcgtgtgactgccctctccctgctgctgggtcctcatgcgattgccctctccctgctgctgggcttctgcctttgttggcctgatgtgctgctgtgatgctggtccttcatcttagaaaggtgttcatgcagttttatcacaggtggtgttgggtcaatagtttcccaatttcaggatatttccatgtcagaaatagtgcatcttaggaatgactaaacaggatattgttggtttaggctgcacaactgataaaatgactgtaaataaatgttgtaataaatgtagaaaaaagagtgggaacacttataaatatttggaaattaaaatagtgcctttttaatttgcatttttagattttaaaaataattatagagttgcagaaattataaaaaatagtgcagagttctgtgtattcttcatccagcttattcaaatgatgacatatttatatagtacaatgttaaaaccaggaaattgacattgctacaatctgtaggccttatttagagttaaccggttctctacatctctcgtttgtgtgtatatgcgtacttctatgcaattttaattttttctttttctttttttttcttttttctttttcttttttttctgagacagagtctcgctctgtcccccaggctggagtgcagtggtgtgatctcggttcactgcaagctccgacttccgggttcaggccattctcctgcctcagcctcccgagtagctgggactacaggcgcccgccaccatgcacggctaattttttgtatttttagtagagacggggtttcactgtgttagccagggtggtctcgatctcctgacctcgtgatccgcccgcctcggcctcccaaagtgctgggattacaggcgtgagccaccgtgcccggctgcaattttaatttttttaatgaagctgtaaagggagacttatacaatagcataatatccattattagtagcaaagtaacagtgtaagaaacagtacatcagacttagtcaaagggcaaacaaaagccaagtttggtgatcagggaaaactctgcatccccaaatgcttattgagtaaaatgaaggcctaccagtcaaaacaccacattaaaccagatgctggaaaaaggatggtgatatggtttggctctgtgtccccaccgaaatctcaccttgaattgtaataatccccatgtggcaagggcagggccaggaggagataattgaatcatggggatggtttcccccgtactgttctgacgatggtgagttctcatgagatctgatggtttcataaggggcttcccccttcacttggctctcacttttcttacctgctaccatgtaagatgtgcctgttttaccttccgccatgattgtaagtttccccaggcttcccttgccatgcagaactgtgagtcaaacctcttttctttataaattacccagtctcgagtaggtcttcatagcagcatgaaaacagactaatatagatgccatgctcctctaataccaatgttgctctgtgcatgtgtctttgtctatgtaagaaagaactgaaactagaaaagtagaaccattacatttagatatgtcctggctgtagtttggatgggtttggagggctgacacgataaaagtaatctgacagatgagagtaatgggtttagaaaaataaatgtgttggctgggcgcggtggctcatgcctgtaatcccagcactttgggaggctgaggcacgtggatcacgaggtcaggagatcgagaccatcctggctaacacagtgaaacctggtctctactaaaaatattaaaaaaaaaaaaaaaattagctgggcatggtggcgggcgcctgtagtcccagctactcgggaggctgaggcaggacaatggcgtgaacccaggaggcggagcttgcagtgagccgagatcgcgccactgcactccagcctgggggacagagtgagactccatctcaaaaaaaaaaaaaaaagaaaaagaaatttgtttctaatgtgcaggtttaattagagtggaagatgtcaataaataaggttttagccagacacggtggctcatgcctataatcccagaaatctaggagaccaagacaggtggattgcctgagtttaggagtttgaaaccagcctaggcaacatggcagaaccctgtctctacaaaaaataccccccaacaaaaaaattggccaggtgtggtggtaggcgcctgtagttccagctaccctgcaggctgaggtgggaggatcgcttgagcctgggaggcagaggctgcagtgagctatgattgtgccacttcactccagtttgggtgactaaataaataaataaataaataaaatacaataaaataaagaaaagaaaagaaaaagaaggaagattttaaagataccattgagtagcctagagcgctaaactctgatctgcttctccttacctaacccttttgggttttttgtttgtttgttttttgtttttttgtttttgtttttgttttgagatggagtcttgctctgtcaccaggctggagtgcagtggcatgatctgggctcactgcaacctctgcctcccaggttcaagtgattcttctacctcagcctcccgagtagctaggactacaggcaggtgccaccacacctggctcatttttgtatttttagtagagacggggtttcaccatgttagccaggctggtctcgaactcccaacctcaggtggtccgcccacctcggcctcccaaagtgctgggattacaggtgtgagccaccgcacccggccaatcctttcttgttactttcctttaatgcagagtttctcaatcttggcattgagaatgggatggataatttttggttgcagtgggacatcctgtgaagtttaataactttaacagcatcactggcctctttttagtacataccagtgaggcaggataggtagtcaaggagtgaccatatcctggggacgcagcaaccagggtgtccatacaatcaacacaataagcctcagcattcgagtggtagttcagctcattcaagcaaagctttcttcagcagggaatttcacctgtaggaacatgtgcgctttgattttacctttcctcagacaccctttgctcattataatagtaaaaaacaggccgggcatggtggcttacgtctgtaatcccagcactttgggaggccgaggtgggcggatcacctgaggtcgggagttcgagatcagcctgaccaacatggagaaaccccgtctctactaaaaatacaaaattagccggcgtggtggcacatgcctgtagtcccagctattcaggaggctgaggcaggagaattgcttgaacccgggaggtggaggttgcagtgagctgagatcacgccactgcactccagcctgggcgacaagagcaaaactccatctcaaaaaaaaaagtaaaaaacacacccatgggtggcgatttaagatgttaatgagacatgtgacgtatgaacaagtgtgtacagctactgcacatgtgcacccagaggagcacccagaacatggttactagtaacacctctttcccacctcctcatgaataatcatggaagtctgccataaagggaatcccccagcaccagtctttgctgtctaatccttaggagcaccccagcctgaattctctctctcagggtgtattgtctatttttcacctaattttcaagatattctttttgctttacaataaattactctgtgctccatctcttgctgtgtgattcttatttaagttcttttaaactaagaagacaagaactgaggtatcacaacaccatcaacaccagtagcacctcccatcccgaatatatgttagtgaaaaatgtctctggattttgctaaatgatccctggaccatgacactgacccattgcttgcctggctccatcatgctccaggaggagtgcaattgagtctttgaggttgttagggcttgtaaagtttggaggctttaagttgtacctgcaccagttttggaggtggacacacacatttggggatgctaggactctgttcctcccccaacccccagacttttaaggcaccaaggaatataaatatcatttattattttccaggcaggtgccaagccctttttatttaatattccatacaaaatttgaaaaattaaaaacaacctaaagtggagatttctacctctactttttcagatgagaaaattgagaaatcaaaagttctgagactcattttttaaattgagctcatatgttttgagtgtttcttatgttgccagatgtcaatggagtttctgggatctgaggggatgtgggaaaaacatcgtttctttttttttttttttttttttttgaaacggagtctcgctctgtcgcccaggctagagtgcagtggtgcgatcttggctcactgcaagctccgcctgctgggttcacaccattctcctacctcagcctcccaagtagctgggactacaggcgcccgccaccacacctggctactttttagtatttttagtagagacggggtttcaccatgttaaccaggatggtctcagtctcctgacctcatgatccacctgcctcagcctcccaaagtgctgggattacaggcgtgagccaccatgcccagccgaaaaacatcgtttcttagttgagttataattaatattgagagcattaaatttatgtagaaaaatcatttttccttaaatcctcaaagataacaaacaagcataaaaatcatttatagatttagtatttttctgttaaaatcatttactcttctttgtttttgggtcagtgttcaattggtttatacctttgatagttgaaatttacttactgaatactgatatcatttgtgggtcctggtaaatatttcaaagttgtcgtacaaacaggacaatagattctctcaactcttcaaacgtctaacatgacagacttataagtcttttttcttcttttttttttttttttttttttttttgtagagatggggtctcgctatgttgccaaggatgatcttgagctgctgggctcaagggatcctctcaccttgaccttggcctcccaaagtgctgggattataggcatgagccaccacgcctagcctcttgcaaagtcttataatgtcgtttttaaactcttaagctgccaagtgtgggtggctcatgcctgtaatcccaacattttgggaggctgaggtgggaggatcacctgagcccaggagttcaagaccagactgggcaacatggcaagaacctgtctttacaaaaaattaaaaaataaattagctgggcatggtggtacacacccacagtcacatctacttgggagggtgaggtaggaggattgcttcggcctaaaatgttggctgggcatggtggctcacgcctgtaatcccagcactttgggaggccaaggtgggtgagtcatgagatcaggagttcgagaccagcctggccaacatggtgaaaccccgtgtctactaaaaatacaaaaaaattagccaggcatggtggcaggtgcctgtaatcctagctactcgggagggtggggcaggagaattgcttgaaccgggaggcagaggttgcagtgagccaagatcacgccactgcactccagcctgggcgacagagagagactccatctcaaaaaaaaaaaaaaaaaaaaaaaaaaaagtcaaggctgcagaaaactatggtcactccactgcaactacatcctgggcagcagagtgacctttaataaaataaaaacacccttgagctactctcgtaaacccagtaagacttacacatttaataaatcagattgtcttaagccttttgacatcctaaatataagcttatgcaaagcagcaacacacatgtaaaatataaaagtaacaaagataacttcaatacaattttttttattttaaaaattttttaagagttgggggcttgctctgttgcctgggctggagtgcagtggcaggttcattgctcactgcagcctgaaattcctgggttcaagtgatcttcccatctcagcttcccaagttttgaggattacaggtgtgagccaccatgctcagctcttaacaacttttttttttttttttttgagacaacgtctccctctgtcacccaggctggaatacagtggcaccatcacagctcacagcagcctcaacctcctaagctcaagcgatcctccagcctcagcctcctgagttactgggacgacagttgtgcaccaccatacccagctactttttaatttttttgtagagatggtgtctcactatgttacccaggctgatctcaaactcctggcctcaagcaatctttctgccttggcttcccagagagagtttttcagtccatcatttttcaggattgtgagccagggttccattagatcttattgagatatctcttgtgtgtctgctgtgtgccagacatggtttaaaagactagagatacaggccagggatggtggatcacacgtgcaatcccagcacttagagaggccgagatgggcagattgcttgagcccagaaatttgagaccagcctgggcaatatggcaaaagcccatctacaaaaataaaaataaaaattagccgagcatggtggcatagctgcatgtagtcccagctacttgggaggctaaggtggtaggatcgattgagcctgggagatcaagtctgcagtgaactgaggtcgcaccactgcactccagcctgggtgacagagcaagaccctgtctcaattaaaaaaacaaacaaacaaaaaaaaaacttaggatccagcagtgaacaaaatcatcactgacgcttaccctcatggagctaacattctggatgaaaagtcagaaataaacaataattataatacagaaatagacatgataagttaaccagtgctataacaaaaagaaggaaaaggagagtaaggtggatcagggtgtcagagtttggggagttgtttgcaattttcattagaatgatcaggaaacagcttatttagaatgtgacatagatcaaagtctatagggagatgaggggctgagccatgtggagattggggtaggaagtggatttcctgccacaggctttcaagcaagcatataatatccagggctgggtgctgtggctcacgcctgtaatcccagcactttgggaagccaacgtgagaagattgcttgaggccaggaattcaagaccagcttgggcaacatattaagacccccatctctattttttttaatcttttttttttttcttttgaaacggagtctcgctctgtcgccaggctggagtgcagtggcccgatcccagcttacttcaatctctgcctcctgggttcaagcgattctcctgcctcagcctcctgactagctgggattacaggtgtgtgccaccacgcctggctaattttgtatttttagtagagacttccccatgtttgccaggatggtctcgaacttctcacctcgagtgatccacccacctcagcctcccaaagtactgggattacaggtgtgagccaccacacctggccaaaataagccttttttactgtatttatttgaagattaaagatggtttaaggtgacaaggggtagagtatgattgccaactatatgtgtaaacttgtttaggctgtactacccagaaattgtattaaacactgaccagggtattgttatgaaggtatttcatagaaacggttaacatctataatcagttattttgataatgtaggtggttcttatctaatcagttgaaaggccttaagagaaaaacagggttccctggggaagaaattctgcctcaagactgcaccttcagctcctatccacgtttcaattctgctggcctgaactctagcctacagatttgggactggcctgtccctgcaatcacatagcccatttcttcttctatctttttttaaaatttttattgtaggcaaggtgggtggctcacacctgtaatcccagcactttgggaggccaaggtgggcggattatgaggtcaggagttcaagaccagcctggccaacacagtgaaaccccatctctactaaaagatataaaaaattagccaggcacagtggcgggcacctgtaatcctacctactcaggaggctgaggcaggagaattgcttgaacccaggagatggaggttgcagtgagccaagattgcaacactacacaccagcccgggtgacagtgccgagactctgtctcaaaaaaaaaaattattgtggaggaatggtctcactatgctgcacaggctagtctcttaactcccggcctcaagagccgggtctgtcctgtagaccctggctgagcgatggatgaaaggagtactcagacacaggtatgtagtgtaagagcagctaggggactgctgaagagtgagcagtcttgataagctgggactgcttgcttttattcagtacagacataatgccaaaagcctggagccaacacagtctgtgggtaattaacattattgttcccccttttgggggcagcctcactcgtgaatgatcaaatgttggttcctagttaacataagtaaacaagcctgtttatgttaaattcccctacacttccttgtacctactccttgccctctgccttagggtaagagaacagctgctttcagcttattctcccgtgaagctatgcagagacttctgacctttcagaaggtttgcgtccttttcttatagcttctcccaccactctgaccgatctcctacactcaagcaatcctccttcctcagcctcccaaagtgctgggattacaggcatgagccaccgcacaccacccccatttcttgcagtaaaatatgtgtgtgtgtgtgcgcgtgtgcgcgcgtgtgtattccatttctccctaataccatttctcagctgcatgaatccttaactcatgaaagatactttttatcctcttgactctacagttaatggaaaataaaaatcatcaatagtgacttctaagattgcttaatatacctttctgggaggacagttagaactcctaatgtgagcttgtcagtttcttgtgaaaaccaacccagttgtcccatagaactgatgtttgtggtttcttttgactgaacctagaaattgaccctcccactcttaaaacttgagaaaagtacatttgtcataatcgtttgtcacagaaataaccaaatttccttgtccattgttttttaactatggttgtcctaagacttttgtcatccacaattattgtttgactttgagtcttctccaaaggtggcttacagtcagctacagttcagggcttctttgagagagttcataaaaagaacacttgaattcaagtttctggtaactttggagattgtcctatcagcctagagagaaaacttccaggactctaattagaaggctgatatattcataaaatacataattatgtatacatatgtttatgcaatatgaagcagagcaggagtttcatggactgtactaatttatttcatgataaataaaaatattttattatatagtatattaagccatcttagaagtcactgttgatgatttttttttctccattaactgtggagccaagagggtaaaaagtatctttcatgagttaaggattcatgcagttgagaaatggaattagggagaaatggaacacacacacacaaacacagagatttatttcaagtactgaatttattttattattttttgtgtgtgtttgaaacattgctgattctttttgttttgtttttgagtcaggagaactttttttgtaaatctactttctgtctctatgaaacttttttctttccagctatttatagcctttaacaattgaatatacatttgtaaacaaaatttgagggctatttctctctctgcctgatttctccagaattcagaaactatttgtgaatattcttaattcacggcaatgtggttgtttgcatatgttcaataagaatctgttttctagctaggtgtagcatatgttcaataagaatctgttttctagctacttgggaggctgaggcaggaggatcgcttgagcccaggagtttgaggctgtagtgagctatgatcgtgccactacactccagtctgggtaaacaagcaagaccctatctctattttttaaaatccatattattttataacacaattgtaggcactgggtcttttcccaaggctttgacaggaatggcatatttttaactatgcgagactgctttgaggaattaagactgactttatgggccaggcgtggtggatcatgactgtaatcccagcactttgggaggccaaggcgggtggatcacgaggtcaggagatcgagaccatcctggctaacatggtgaaaccccatctctactaaaaatataaaaaattagccgggtgtggtggcaggcgcctgtagtcccagctactcaggaggctgaggcaggagaatggcgcgaacccagaaggcagagcttgcagtgagctgacatcacgccactgcactccagcctgggcggcagagcaagactgtgtctcaaaaaaaaaaaaaaaaaaaaaaaaaaagactgactttatggagctgatgggagcccttggaaggactggcctcatatcttgtgcacacagttcctttgtggggttcctggcctgtagtaaatacagtgtcattttctgataggcctaggaacctcaagatgttctggggcctcaagaaaaacgggtttcacccaattcatgcaggtatgtacaggtgcagacagatctttggctgggcttaagaggtctttgggtgttgagtctgagagattccttatgaggggttccagcaaagccaatttaggaggaattgtataaacagtgattcttgctgtagtttggataagtatggtgggactgaagcttgttttgcaggtaagttgttcctgctgtgatttgcttttgatggaagtcagggactagagagagaaaaactgtttccaaagaaaactatagtgctgccaggtgcagtggctcaactttgggaggctgaggtgggcggatcatgaggtcaggagtttgagaccagcctggccaacatggtgaaaccccgtctctactaaaaatacaaaaattagccaggcatggtggtgggcacctgtaatcccagctactcgggaagctgaggcaggaggatcgcttgaacctaggaggcagaggttgcagtgagcggagatcgtgccactgcactccagcctaggtgaaagaacaaaactctgtctcaaaaaaaaaaaagaaagaaagaaagaaaactatagcgttagattaacctttgagttaatctgagtggccacgtggtcatctatggtatgcagccacccacaatacccctcctcagcataaagcagccagaaagatcacgtccagattccccatgattgaggaattgataaatagaaacagggaactgaaaccagctccagtgtcccatagaactgatatttatggtttcttttgaatcaacacattatagacattgagcctccccttcctaaaactcgagacacttttatttgtcttatctgatttcctttctcaggaaaccaagcatcaggcctcccagatagtataaagaaactgaaacttactggattaccacatctggaaaaacgagatgctataccccttacccatgatgattgcctaactgaccatctgctgcctgttgacccattcctcttccttaccccttcctaattcctgttttctcaaacatagttacacttcttccctgatgtataaacccctagttttagtcagttgaggaaagagatttgagattgatctcccattttcctcagctgcagcaccgaataaagccttcatccctgacaatactcattgtcttgctgactggccttctgtgcagcaagcagcaggatctagatgcaaggacctggcctttctggtaatattgtcatcaaccatttaatgatgtagacttggtccccggctcatgctctgtgtattttcttctccatctacatgcattgccttgatggtctcactcaatatcatgacttgaaataacagtgtaaggtaactcctaaattcatatattcatgctcaaaccttcttccaacattcagtcgtaagtcgaattgcctgtgacagagatactttgtggttctgtagacatttcaaactaaccatcctgagcctccgaacctcctccacttgcagcctccccacctcagaagtgggcaaatccactttttgtgtggtctgggccaaatacatgactccctgcatcacgtagaggctgtgctggtccaaagaaggctcaaaagagggcagtttgcgcacacaacgtgtcggggcagggcttccagatgatcattcggcttttttgtgtcttccaagatgatgatccggggaggagggatgtgaaagggggtcagtcgccaggcgagctgaggacccagttctgcgcctttgcctgtgccctgacctgaaggaaagtccctgtctcccgagctccgattttcccgagagaagaatgcaatgtaacccttgcccctcggttccctccctccatccttcccctcgagttgtgcccaccgtaaagaggtgggtctggagcgtctcctcgggtcctggagtgcctttccctgggaggaaaacttgcgccgtgaagcgttcctcccgttgttgaacacatgaggaaaactacactacttagaaggctgtgcattatgcgtacggcgggagctgggccaacgacggcctaggacggggacgtttccgacggctcacgccggtgggggcgggacttccgggttgctcgctgcggacgccattttcttctgcacttctgtctggagaggtctgtagccactgagggccccggtcggggccgctttgcaggtccctagtcaggaccgagcaggggagtaggataggaatccccgccgcacctttgtacgagcctgaccccttccgtgggtttgttcctgggtcgccgtcaagctgcggtctctcctcccccgcccttcagccccgcggtctccaggggcggcgccctgggtctggaacgcggttgccaccgaggaggcggcggccctgcgtctggaacgccgttgccaccgaggaggcggcggccccgagcgcgcctggaagccccgggcaaccggccagggtcgggcacaggtggggtccgtcaggccgcccggggctcctctgtcccagctctgcggcccagggggtgacgtgatggcggcagcggtgctgacggaccgggcccaggtgagtggacggtggcttcgcggttgccgcttccttgccagcgctgaggcggtttccgaagtgggtgggagcccaggtatcccctggatttgtcttcgcagtcgtcgttcgctttggtgtgtggagctggtttgccacttaatttatacctggccgtaaggagtgttgggcctactggaaggagctccgtaggttgttgagtgaatgatgcttcctctggggactcccatcatccttggcctgcaagcattctctggtggaccaggtctcattccagcatgaattgggggcctgaggggggaaggggagggcagggcagtagcaagccgacaaatgcgcgagcagagacaaggtatgttgtatgtttaaggaggctcaggagggtgtgtaaggttgccatggttttcctgcggccgctgagacgtggagggcaacagtgtgtggtcttttcctggatgttctagccatccgcaactactgcagacattgtggccagtcagatgcccttactctcatcgctacagcctgcattatccttggccgctcgtgttccgtggccccaaagtatcctggcgtcagagacaagttctgtcggaacccagtaaggaaagaggccgatggttggttcattgtggaatttccttgggggatctgggagacccagggagatcccagagggcatgggaagctggtctggagcctgtcgttccccaagtagatgcagcccttccagtgccgctctgtggggtcagtgaggaatgctgagctttttgtgcccgtgttcacatacttttttttgttttgagacagggtctcactctgtcgcccaggctggagtacagtggtgcactctcagctcactgcagtctctgcctcccaggttcaagcaattctcctgccccagcctgccgagtagttgggattacaggcatgcactaccacacctgactgatttttgtattttagtagagactgggtttcaccatatttgccaggctggtcttcaactcctggcctcaagcgatccgcccacctcgacctcccaaagtgctgggattacatgcatgagccaccatgcccggcccacagatacgtttttcagggctaattgaaatagacttaatgttagaaatgagtggaaatgcttataacttcatcgcattagatttgctttgatgttgggggagtgttggagttacactgttagaccgtgaatcatagtaaccccatgtttagatcctatctatggtggtgagatgtgtgactgggtgaattgatagcgcttccttagcatgaagtcattgactgtgaaggtgatgatggtgttgactgcagggactgtgaaaggattaataaaaatcccagagcacactgagcattgaatactttaaatttaacaactgttactggtgggaagtgttattgtattgatccagaaatcaaggctcagagaaatgaaatgctgtctttgaggtaagagctgtcaagtgtcagtttcaagtgtttggagctaggaacttctagtcactgtgtttacacaggatgtgaagccttcaacatggggcaggcacctagctggaccagtgagactcaggtactgccgttgtaaccattattgctattattaccatttccccatttccctgtcgttttagagcccttagcttctgtatttcacagtccacaagttgtttccgttgtcctgtgtcattctctaacggccgttaaataggaggcttctctcctttactctggtattatgttaaaagcatctatcttccctcttgagcccagcacagagctaggccctcaggaggtgctctgtgattcaggccgccatcactgtacaccttttccagtggagcacagtctgtgatctcattcagcagctgaaaggccaatactactaattctgtttgactttccaggtgtctgtgacctttgatgatgtggctgtgactttcaccaaggaggagtgggggcagctggacctagctcagcggaccctgtaccaggaggtgatgctggaaaactgtgggctcctggtgtctctgggtaaggccttccttccccctccaccatgcaggtgacctgccacttccttcattccatcttctgactccaggcctggctgcacaagaaggcctctagaatctaccttgcctctttcccacagctttagtcattttccacagtaacctcttcctatctggtctcctatatctctgggctaaagacagggtactctttggctcccagccaaaggagaaggtggtaaaaggaaatggggtgttttgcaaactcaaaggtaattttcagctgtgcctcatgaggggctggtgtaggaactgagaaccaccacgatggtgtcctggcttctctgtctgggtctgctcatgtcacgtctattctctatggctttttctgccttagtgagttcaagacaagagtggccacctggattagggttctctaaagggacagaactaatagaatagatatatataaaaaggacagtttattaagtagtaataactcatgattacaaggtcccacagtaggctgtctgcaagctgaggagcaaggaagccagtccaagtcccaaagctgaagaacttggtgtccaatgttcgagggcaggaagcatccagcatgggagaaagatgtaggctggtagtctaggccagtctagtcttttcatgtatttctgcctactttatatgctggcctcgctggcagctgattagatggtgcccacccagattaaggggggggtctgcctttcccagcccactgactcaaatgttgatctcttttggcagcacctttacagacacacccaggatcaatacgttgcatccttcaatccaatcaagttgacacattaataaaaatcccagagcacactgagcattgaatactttctctttaaatttaacgactgttactggtgggaagtattattgtattgatccagaaataaaggctcagagaaatgaaatgatgtttttgaggtaacagctgtcaagtgtccgtttcaagtgtttggagctagggacttctggtgactgtgttaacacaggatgggaagccttcaacatgggccaggcacctagctggacctagctgttaaccatcacaactccatcccttgtcaacttgaacccatacacatctcctgagatcatacataatcttcaaataaagacaataaggtcataattatgcttaacataatacaagtatcgttcatgcaaccgaaacacactaatccccaacccaagtgctattacataaaggtagcaatacttaaatgctgatatgaagtcagtaaatcttacgtcacatgataaaggaaataaaatgcagatgttttcttagtacaagtgtatacatcacaaacatgtttttaataaaagaaggaggaaatacaacaattacagtcctcatttctgcaactggtcacttggtcgtagttggtattaatgactaccttcttctcctgcacattctgtattcactttgccttcagcaagcacctcagcaggtcatggttttttttcctggtggagtgacccaaaccttcattcctgaagggtctgggccatttgtagtcctgcctggattgggctgttgtagcttcccattgaccttaatcacagggcatggtaatactaagagatgccctaatggatcttctgtattccatgcatactcttccttacctccattgtggagtagtagactgatttcatcttgatagtctgggtcattcatcccagccaacactgtaactcccttcttaggctattgacttaaaggtaggaggagcccaaagtgtccaggtggcaatcttaacttccagtttaatggaatcgttgtgtctcctggtggcagcattcctccctctgaaactaagacttctaggccaacggaatgtaatgtcgcgggaataggaagcaaaattttgctagttgatcactagggatgatgttgagtggtgccatttgcacttccaccccttgattcctggacccatgaatcctggctatgggagaaacagtaccatatattggatgctaattcagagcatacatggcctactggagaactttgccccagccctgcaaagtattgtcactagttggagtaattatgactacaaaaggtcattccaccattctgtcaatccagttgcttcaggactatggggaacatggtaagatcagtgaattctgtgagcatgagcccactgctacacttctttagccataaagtgagtgccttggtcagaggcaatgctgtgtggaataccattacgatggataaagcattccatgagtccgtgaatggtagtcttggcagaagcactgcgtgcaggataagcaaacccatatccagagtaagtgtctattctagtgaggacagacctctgccctttccatgatggaagaggtccaatataatcaacctgccgccaggtagctggctgatcaccccgagggatggttccatattgagggctcagtgttggtctctgctgctggcagattgggcactcagcagtggctgtagccaggtcagccttggtaagtggaagtccatgttgctgagcccatgcgcaacctccatccctgccactatgaccattttgttcatgggcccattgcacgatgacaggggtggctggggaaagaggctgagtggtgtccacagaacaggtcatcctatacacttgattattaaaacctttctctgctgaggtcttccattggtgagcactcacatgggatacagatatcttcacagtttttgaccactcaggtccatccacatccctcttccccagatttctttgtcaccaactttccagtcatccttcttcgaagtccctgaccatccagccaaaccattggctacagcccatgaatcagtatataattacacatcttctcatttctccttccatggaaagtgcacagcgaggtgcactgctccaagttctgcccactgggaaatttcccttcgccactctccttcagggatgtcctagaaaggggctgtagtgctgcagctatccactttcaggtggttcctgcatatcatacagaaccatctgtgaaccaggccctagtcttctcttcctccgtcaaccgatcatagggaacttcccatgaggccatcggtgcaggctgggggagagaaggtggggtggcaggagtggagtctgtgggcatttgagccacttcctcatgtaacttgtgccttcaggatccgcttgagcccaatcacatatataccactttcatctgatgatggaatgctgctgtgcgtgacccacttgatggctagctgggtcagaaagcacccagttcatggtaggcagttcaggttgcatggtgatttgatgacccatagtgtaacaggccaagagctgtctctcaaaaggagagtagttatctgcagaagatggcagggccttgctccaaaatcctagaggccttcgctgtgattcacctatgggggcctgccaaaggctccaaacagcatccctatctgccactgacacctcaagcaccattggatctgctgggtcttaggggccaagtggcagagcagcttgcacagcagcctagacctgcctgttgcagagccttctcctgttctggatcccactcaaaactggcagccatttgggtcactcgataaatgggctggagtggcatacccaaatgaggaatgtgttgcctccaaaaaccaaataggcccactaggcattgtgcctctttcttgattgtaggagggaccaaatgcagcaacttactcttcaccttagaaggcatatcttgacaggccacacaccactggacccctagaaattttactgaggtagaaggtccctaaattttagtcagatttatttcccatcctctggcacacagatgtcttaccagtaagtccagtgtgtttgctacttcttgctactggatccagtcggcataatgtcataaatgtaatggaccaatgtgatatcttgtggaagcaaaaagcgatcaaggtctctctgaataagattacgacacaaagtcggagagttgataggcccctagggtaggaccgtgaaggtatattgctggccttgccagctgaaggcaaattgcttctggtgggccttatggacaggaatggagaaaaaggcatttgccaagtcagcggctgcataccaggtaccaggagatgtgttaatttgctcaagcaatgaaaccacatctggtatagcagctgcaattggagcaaccacctggttaagctttctataattcacagtcattctctaagatccgtctgtcttctgctcaggccagatgggagagttgaatggggatgtggtgggaatcaccacccctgcatcattcaagtccttgatggtggcactaatctccacagtccctccagggatgtgatactgtttttgatttactatttttctaggtagaggtggctctaatggcttccatttggcctttcccaccttaatagccttcaccctaacagggagccagtgtgggggttctgccagctgctaagtatgtctgtgcctattacgcattctggcactgggaaaatgaccacaggttgagtctggggacccactggacccactgtaagtcaggcctgagctaaaactcctgacctccataagcccctactttaactggaggaccacaatgatgttttgggtcccctggaatcagcgtcagctcggagccagtgtcctgtagtccccgaaatgtctgatcatttccctttccccagtgcacagttaccctggtaaaaagccagaggtctccttagggaaggatgagagaaagattaacagcataaattgtcagtagtgtagtggggtccttcctcaagggacctggcctccccttcattcaaggggttctgggtctgtaaactagcccaagtctggaaattgaagggccatgattctgtttttgtaattcaaattagtcttttgtccattcgacctggaagttttctgcttatataaattaaataggattgcagtaggcttcctatcagtttcatttctgggaacactgtgattaattagccaacgccagagatctacatgagtcagactattctgattgctgctttgtctctgttgtccattatgatagctatgcctaccttgcctttgatggttgagtgccaccacttggcccctgccacctcgggatccaattattcccaatgtattaaatttttgtaggtgagtgactgaaattccaactgctggatctggcaattacagggctcttcaaagatgcaggtgctgccctcgcaaatctattttgcaagccattggttaaggttatgtcttatggaccctcccagctgggatgagtaggtctaaagtgactaatctactccatcatcccaatctccctaagcctttggatcccttcctctacattagaccaagggagatcaagcattcccagctcacccatgatgggccatcttttaatccatatttcagctagccaagcaaataagctattggaaccttttttaactcctcaggctgcaacattaaatgcaggatccctaattagtgagcccaaatcaataaattcagcctgatgcatctgtatgttccttccagcattatcccacacccttaatatccattcccgtgcctgttctccaaatttctgcttatataaattagaaaactcaattcaagtgtagctcacctccccatgggtcacactctgaacctcacttctgtgggcccatcgggactttagttataggtctagaagcaaacaaaggtgttgagggtgctagaggagaatcgatattatcttgcctggcaactgcctcaggggaggccatcactgttgcctcaggcagcacagggtttatctcctcagacaaaggtggaaaggctgatggcagcatgggtcggggagaggatgttgccactattggggatgccattttcctttctctttcttctgcctattaaacctccactcctaaaaaaaaaaaaagaaaaaatgatgaactcagggattctaactcctggcttcagaagcagatactaagcctcaaatctgctaagattgccctgagtgagtcttatctcctgtagagaaaaagctgaaattgtagaaaaacagacataagctagtcatgtgagtggctgacctgcaacaaaaggtgcatgcacagcctcaccaggtgtctactgttaaagtgagggcactgattggaaaagaatgggaccctgaaacttggaatagggatgtgtgggagaaccctgatgaagctggggacactgagcttgtaaactctgatgaaccttttttgccatcccccaaatgccatcccagcgctttgggaggccaagatgggaggatcacttgagcctagaagtttgagacaaagcctgggcaacatagtgagaccctgtctctaaaataaattgaaaaaaaaaaaagccactcagtaccctgttttactcccccaccccaccccgacctttgggtcttgtctttttctttgtctttgtctcttgtctcttgtgtcttgtgtcttgtcttgtcttgtcttgtcttgtcttgtcttgtcttttctcttttccttttctttcgttttcttttcttttctttttctgtcttgctgtcttgcccaggttggaatacagtggcacaatctcggctcactgcctttgcctcctaggttcaagcaattctcatgcctcagccacttaagtagctgggactacaggtgtgtgccaccacacccagttcgtttttgtatttttattaaagacgggattttgccatgttggccaggctcgcctcgaactcctgagctgaagtgatccatccgcctcagcctcccaaagtgctgggattacaggcgtgagccaccacacccaccctttactttttataataaaattttttttatacatttgttatatatgtgctatatataattaccatatatgatttgttataaacattagtatataaatgctggatttctaattggatcaaattatggacattgttttaatttacttattgtatgtgtatatatatacaacttatttatgtgaagatatttatatatatagtttttaagactaaataagggtggtattgtgtttgctaggcctggcatttgtatggtacataaggtttaaaagttcactttcttttttctgccccttgggtttgtagctgcctttttctttttttcgttatttctctctttgtgttttaggcttttggcatccagaagtagtggatcttagtttctgtccctgggtagtaaaaagaagctggggagaggaagaggtttgatgcctccaggcagctgcctctccctggtacagcctctgtcccaagtgtaatcagtcccccgctaaatgactagtctcttacaggatgggaagagagaataaataactcagttaagcagcccaccagtgactttggtgttggcttggttgattggacttgtatcccaacacaatccatcagaggaagtctctactcactaccttttgtgaggagcctcagccttgtatattaccccgtaaaccaacccagaaactaggtgtgtttatgttggaaaagtagactaaggagatcagtctgtcccagaacggtgccagctggggaattactgcccttgcgtatctagactgtggcatctttaaacactggaaggatctgaggagcactcctttaggattcctacagcactttaggccagaaacccatggcagcaaatgccagacgcagctgaagcacaaggctgccagcatctcgcagccttccccgggcagaactttctgtgtggtacaatcccttagtgagctgatcttcagccttcccatgagcgcagagtcagcctgctgggtgcaccagttgtattaatttgtatctatgggccaagtgtggtagctcatgcctgtagtcccagcagtatgggaggcaagagggttgcttgagcccaggagtttgagaccagcctgagcaataaagtgagacccagcctctacaaaaaaaatcaaaaaaattatctgggcgtggtggcacatgcctgtagtcccagctactcctaaggctgagatagggaagattgcctgagcctgggaggtagaggctgcagtgagccatgatcacaccactgcactccagcctgggcgacagagtgagaccctgtctcaaaaaaaagcaaatttgtacccatgggattttaatttatagcagtgacttagtgatgacacagagaggttaataacattgaaagaagaattcattatttacaattcgtgaaagaagagggcatatgctgggcctcatggggatacagctggaagcacaggggaggagaaagcctttaactgggtgtggtattctgatacatactggtttttgtccaccgttcctgattcataacccctatagcccttttgttaaaatgctgggtatgttaggcctcagggtcaggcctctgacctcctgccctcctttcgctctaacgttcctccacctttctgactgtgggtctcatgagtgggtccaaccctataccctgggaaaggaatgttgatgttttgaagcttccataaagactccaagaggtcacagttgagtgagcttccaggtggtccccccaggaagggcatggaagctctgtgccccttccgccacaccttgccctaggagtctcttcatctgtatcctttgcaatattctttataatacactggtaaacatgagtgtttccttgagttccgtgagctgctccagcaaattagttgaacccaaagagggggtcgcgggaaccccaactcaaagcccattagtcagacattttggaggcctggacttgtgactggagtgcagggtggggcagtcttgtggactcagccctcaacctgtgggatccgaagctatccctgcgtggatagtatgggaacagaattagaggacaccccccactggtgtctgctgcttggagtttggggaaaaccccccacacatttggtcatagaagtcttgttctgtattgtcatggtgtgagagtagagaaaaaacatgattagagagagttttccctgcgtattgggtttcttctggaaaagcaagacagggcatggtaaacagtttagagctggctagtttgagtaatttcagtgaggtttggggcatagggactatctctagttgtctggcacttggccctgggttgatttagggcaggggaaatactggcttggtatgtgagagtttgttaaagaagtggttgggggtatggtttggggttaggtggattgcacatgaaaggcatgtgcttgttcccaggggagtttattatcctagaaattacctgtccctgagaggagcagtctctcccaaagtctgaaaaggcttcaagatgttctgagcaacgtcaagaaaatatgactactgtattttcatctgacatgaacctaaacttactcggtttagaagataaaccttcatctatgaagctgtcctttgagggttttttgttgttcttgttgttgttttttgttttttaaagtagaagtcctctttttatgaaatgttggtgagagtagatactatttgatgtttctgtaaatgtccttatttaactctatcacagtagaacgttcagttttttaaatttttaatggttcatgaaatgcagaggtctggaatcactgaacctgcccctccccctggctgctggtccctgaggatgacctccagctcacatctctgcatcgtcatcactacccaccacccactctgtggtgctagtaatttcctccttagtgtggtgtttggaaggggagcccgaaccctggtgtccagccccagctctgctctttaaaaactgtgtggccatggccaggcgcggttgcttacgcctgtaatcccagcactttgggaggccgaggtgagcagatcatgaggtcaggagatcgagaccatcctggctaacacagtgaaaccctgtctctactgaaaatccaaaaaaattagccaggtgtggtggcaggcgcctgtagtcccagctcctcgggaggctgaggcaggagaatggtgtgaacccgggctgaggcaggagaatggcgtgaacccgggaggcggagcttgcagtgagccgagttcacacgccactgcactccagcctgggcgacagagcgagactccgtctcaaaaaaaaaaaaaaaaaactgtgtggccttggtcaaatgactgaccttgtctgttcctcagtgttctcattggtgagatgaggatttaccacatctgcatcccagggttgttactggggtaaagggttattgatagggtttggctctgtgtccccacccatatctcaccttgaattgtaataatccccatgtgtcgtgggaggtaattgaatcatggggacgggtttttcccatggtgttgtcgtgatagcacataagtctcatgagatccgatggttttataaaggggggttcccctacgcatgccctcttgcctgctgccatgtaagatgtgcctttctccgccttgtgtcatgattgtgaggcctccctagccatgtgaaactgagtcccttaaacctctttctctttataaattacccagtctcggatatgtctttattagcagcgtgagaacagactaataaagttattacgtgaaaagggctcaaaacagcacctgggagaccacgctgtgtgcagggagccattgcaatcctgttgccatcagtactgttattgtcatcctcatcaagatcactgtcgttggcatacctggacccgggactttctgggtagcgttgtggagctttgtggttaaacagcaccgacagcagagatggcaggacctgggccttactgactcagccattcaccagttctgtgctcttcagcaaatcactttacttcctgatcctgggtttctttgtcaataaaatggtgttgatcacgatgtggacttcctggggatgctgtgagaaaatcctcagctggaatcctcattttttctttagtctagaggaagagcattataaaacattgcttaggatgtaaaaaaaataagacttagatcaatgaaatcacataccttgtttggaatgaaaagagtcaatatttaatatttaaatacatcagtttttctctaagatactctatcagtattcacttttggaattacataatgcatttatgtaattatggaaaccttggtttccaggtcacatgccagcttttcattcccatgcacaggagcagcttcactccaaggtctggtctccatcctgaagtcccaaactagattgaaggtctttatttcttttcacccacatccatgtgtccacttgctttctccataaacagggtgtcctgttcccaaagctgagctgatctgccacctagagcatgggcaggagccatggaccaggaaggaagacctctcccaagacacctgtccaggtaggagccaagatctgggcaggttggagtcccttctggcttaagactggatggagaccactggccctggaatctcttgggaagcttctcattgtggcctctctctatataactcttatataactctatcacactagaatgttccatttgagagccatggagccctttgacctgtgttttctctgtcctcctagccccatcacagtgtcaccatgcctgggaagaagtgagatttaagaactaagatgtgttcaggggttccaactgtgtgggcctgaaatgtggcttgccagtcacctgctgtgtggccctgatgaagttgcaggatctcctgtctttgtatataacttcagctaagttaacagtagctgctgtatcagacagattctaaaatctcagtggttcacatatgaaaactctttcccactcataccagggactgtgtgggtcagcgaggagctctgtacgacacagttattcaggacccaggttccttctgtcatcagcctgttgcattaagattatcctaacgtcctcgagctggcagagaattgagggaataagggaagttaaacccacttccagaaataccaactcccctcacattccacccacaggaactaggcatttggcttgggtccatgggactgggaaatgtggctgagctgcttgtccaaggagaagagcagaaggtttggtgagcacctactctcagtccactacattgagtctgttcctgaaaagtgttattagaaatctttttttttttgagacggagtctcgctctgtcacccaggctggagtgcagtggcacagtctcggctcactgcaagctccgcctcccgggttcacgccattctcctgcctcagcctcccgagtagctgggactacaggcgcccgccaccacgcccagctaatttttttttttttgtatttttagtagagacggggtttcaccgtggtctcgatctcctgacctcgtgatccacccgcctcggcctcccaaagtgctgggattacaagcgtgagtcaccgcgcctggcctagaaatcatttttatgtcattgggcagtttaaagatgttatgtgatacattaatgcataaaactggatagtttctgagccatagtaagtgactcatccgaatgtcattattaaccttaaagagtgatgctatgttacatttccttctgaactctagggaatagggcctttcttactctcccaatttctctttccacttatattctgcctatcagcctctcccaccttctccttccacccattccctgagtgtcaatcagacactaagaagcagtagtttgcccatgtcttcctatatctcctgttttccaaaaacctcagggtgacatttgaccttctgtgtcccacactcaggctgctgagggcactgaggccatctgtcatgtgtgtggattggtgccactgcagagccttggcctctgcccgcgtgggttccttgagctgctcatccaaccctgagtgtctgtgcagtccctgttcagcccttcagagtctgttccagattgtcccctcctcagtgccacatctgcacttgaaaatctcaaaagcacaaaactcaacatgcctaacaaggaacccatgatcttgctcactcctgccacctcccaagtttctgtgaatggttctgccatccaggcagattaggggactggccccaacctcagacaagtcaacccctccacctccatgagtccctgcatccagccaagtagacagtttttgtctccaggcacagatgtctcagcatgtgagtgctgatgtgttagcaggctttcaggttgaaaagaaagtctcctgtcttgtattgcttgatcagcagcccttacatgttcatctcaacttctcttttccttactggaagaggtcttgccccagtcatggccaattcctataccagggtctagaacacacttcctttcatggacatcctttcttcatttatattctgcttgttttgtgattctctactcaacctaaaaatatgcttgtttcttcttttttcttttctttttttttttttttttttttagagtctctctgtgtagcccaggctggagtgcagtggtgctatcttggctcactgcagtctctgtgcctcagcctcccaagtagctgggattacaggtgcatgccattacacccggctaatttttgtgggtttttttgtttgctcgcttgtttgttttttgttttgttttgttttttgagatggagttttgctgttgttgcccaggcgggagtacaatggcgcaatctcggcttactgcaacctccgcctcccaggttcaagcgattctcctgcctcagcctcccgaatagctgggattataggtgcatgccaccacgcccggctttttttgtatttttaataaaaatggggtttcaccatgttggccaggctggtctcgaactcctgacctcaggtgatccacccgccttggccttccaaagtgctgggattacaggtgtgagccactgcgcctggccatatttttagtagagacagggtttcactgttgttgcccaggctggtctgaaacccctggcctcaagcagtccatctgcttcggcctcccaaagtgcagggattacaggcgtaagccactatgcccagcctcgagtttcttacaattgaagaaaataaaacaaatgcttgtggctcatgatatatttatatattcattgatacattcatttactatgtgggcatttaattgtctagatttggctggcacagtggctcacaccataatcccagcactttgggatgctgaggtgggaggattacttgagctcaggagtttgagaccggcctgggaaacatggtgagaccccgtctctgcaaaattaaaaaaattagctgggcatggtggctcatgcctgtggtcccagctattcaggaggctgaggtgggaggatctcttgagcccaggaggtcgaggctgaagtgatcttattcatgccactgcactccagcctgggtgacagtgagctcctgtgtcaaaaaaataaataaataaaaataattcatgagagaccatgaaccagaggcaaaaaaaaattaataataattttctatgtttcattcacagaaacagtgatactgtggatattcatatatgtatttcattttccacttgtggaggtgcattttttgatcattcttggagtgaaattattggtttgtaggctatgcaaatgctcaagtttgcaagatcattccctttgttttctaaagagcttatgccaatttgcacttaaccaggaaagagaggttccgttgacccatatcctttccattataaggcttatcaatgtttgctcatcaaatggacacagaatagtctcgtgttcttgatttccctttctttcactgctgtaatgttttagcaacttactatgatttttggttgatttatattttcttctgtgaaaatagaaatcattttttattttatgatgaatgcctatttccattaacctgttttcctttcactgcttggtaggggttcttagtacattcttatccttaccttttatcacttatatatgctgaaaaatattttctagtttttaattttgttctcttactctctttaaagtatctttctccaaaaggtcttaatttactgtagtctaacttatgacttttcttatataattaatgatttttttgtcttgtataaaaaatgttggtttacctcaatattaaaaatatattttattctaaaagttttaaaacttggcatttgacattttttcagtgaggttgatttggaatatatagtgtgatagcaatgcagttattttcgttctccatgtggctacccaatttttctagcttcgtttccttaatttaacagaccatcaagttccatagttaagtatagttggtattttacagggaattatattgaatttatataatttgggtcgaattgtcagttcgtattattaaattcttcattgatctagatcatctttattgtcttcaaataagattttataattttcttcatcttgatcatgtgtatttggggttttttgtttgttttaagagaaaaggtcttgctctgttgcccaagctgggtgcagtggcacagtcatactttgctgcagtcttgaattttgcggctgaagcaatcctcccatgtcagcctcccgagtagttgggactacacaggcttgcaccaccatgcctggctaatgtgtttttagttttgtttttaaaaaattttttttagagatgggagcttgccgtgtttctcagagtggtctaaaacttctgggctcgagtaatctgctcacctcggcctcccaaagcactaggattacaggctttggggggctgaggtgaaaagatgagcaccatacacagcagcctggccattggtcatgtgtatggtgctaatcttttcaccaggctgttcctcaggcatacaagactcattgtgtcaagccaggtcctcttacctctttccttatgagccttcaattgatataacatcagtcatatcaccttcactgtcacccagctcggaatcatgggaatcagcctcccctctgtccctggattgtcatcaacaccatcctgcagtttctttgtactttctgtctctttagactacagtgtccagtgtccttcctgctttctctttatggcaactcttcttcacaagcataggactcacttcattgagcacctcttactggaaaactgatttcttcctacccaggattagccaagctcaaggttaaggacacagtcctctaagactaccaggtctaactcttccgacacggactacaggtttgggtcccaaagccgttgtcaggttcactaattagctttagactcacaaaattctctaaaacctgttttagttacagtcatgtttattacagacaaagggaacaaattagaagtgacacagaatgttgggttggaaaggttcccaacacaaagcctcagtgttttcaggaactcgctgtgccccagtctggcatatggcaatatgagcttagaatgttgccaacccaggaaactcaccagctcttcattgtccagaattgtactgaagcttcattacataaccacagttgattgtctcatcacctgtgtggctcggtctccagcgtgccatcctttccagagattcagcatttaaattatgacataagccctaaccttctaatcacgtggtttagctttctggagtggccagaccttaacctgagtcatctcttcaggataaactgtggaggactccatagtgagttccccgtttgcataaactgtcagatagggccattgggtcccaccataagtaaaaacattttggaactactcagtgtttacaggttactttccatgacttcacaggaaaagcgtacttctctttggggattaatttttgttactcacttcctgtcttccatgtgggctcattaggtgctccttcctcgtgttcttgtagcaacacagcatgtccttgcttagttgcttacaggaagcttaccatgcacggtgtcgtcgttactctgtctacccaggtccaatctgtaattgtgaaggtggctccacgaacagacgcattgtctcctgacccagcctctgcccctaggtctcccatgcagaatatcccgagtccaaggaccaggatagaaagaaattgcaaacccaagaatttgagatacagaaaatagcaacacagaggcaatatttttatctatggtttttcacagaaatggtaatattcttttttccatgttgtcctttactaacaggcccttttgtgtgctggatttctttcaggcgacaaaggaaaacctaagaccacagaacctaccacttgtgagccagccttgtcagagggaatctcacttcagggacaagtgacacaaggaaactcagtggactcacagttggggcaagccgaggatcaggatgggctatcagaaatgcaggaaggacacttcagaccaggaatagatccccaggagaagtctcctgggaagatgagccctgaatgtgatggtttagggacagctgatggtgtgtgttcaaggattggacaggagcaagtctctccaggagatagagtccgtagccataactcatgtgagtcaggtaaagatcccatgattcaggaagaggaaaataactttaaatgcagtgaatgtggaaaagtatttaacaagaaacacctccttgctggacatgagaaaattcactctggagttaagccctatgaatgcacagaatgtgggaaaacctttattaagagcacacatctcctgcaacatcacatgatccacactggggagaggccctatgagtgcatggagtgtggaaaggccttcaaccgcaagtcataccttacccagcaccagcggattcacagtggagagaagccttacaagtgcaatgaatgcggaaaggccttcacccaccgctccaattttgtcttgcataacaggagacacactggagaaaaatcctttgtgtgcacagaatgtggccaagtctttcgacataggccaggctttctccggcactatgttgtccacagtggtgagaatccctatgagtgcttggagtgtggcaaggtcttcaaacacaggtcatatctcatgtggcaccagcagactcataccggggagaagccctatgagtgcagtgaatgtgggaaggtcttcttggagagtgcagccctgattcaccactatgtcatccacactggagagaagccctttgagtgcctcgagtgtgggaaggctttcaaccaccgatcctacctcaagaggcaccagcggattcacactggggagaagcccttcgtgtgcagtgaatgtggaaaggccttcacccactgctctacttttatcttgcataaaagggcccacactggagaaaagcctttcgagtgcaaagagtgtgggaaagcctttagcaatcggaaggacctcattcgccacttcagcatccacactggagagaagccctatgagtgcgtggagtgtggaaaggccttcacccgcatgtcgggcctcacgaggcacaagcggattcatagtggagagaagccctatgaatgtgttgagtgtgggaaatcgttttgctggagcacaaacctcattcgacatgccattatccacactggagagaagccctataaatgtagtgaatgtggaaaggccttcagtcgcagctcgtccctcactcagcatcaaaggatgcatactgggaaaaatcccatcagtgtaacagatgtgggaagaccttttacaagtggacaaacctcagttacccttcgagaacttcttttagggaaggactttttgaatgtaaccactgaggcaaatattttgccagaggaaacatcttcctctgcatctgatcaaccataccaaagagaaaccccacaagtgtcttcactgtgagaaaaccttctgttgctgaatattacttgtcatctgaagagtcatattagaaattcgttcagtctagagccttattctccatctgataatttatcctggagagagacccagtggttattgtgcacataggagaaccttcagctgcatctttctccttagtttacagtgcaattttatctcaggaattatttttaaaaggaggaggggacatagaaaaaatgaaatgcaagcacacatcttttcaggcttctctgccaagcctatggcgctttgtcatggatttcttagtgtatttgggggaagggaaatgtttcaaggtaaagaaccttgaccctttatgtgcttgtatgtacatttattgctatccagtgtcagaacagttagtttaggaaaagtatgcaaactttaatcgcacatcttctgtattccacaatagtacttactcttgagaagcataactttatgacaacttagggggcttgagccatgaaatactcacgtttaagtcagtaaggatacacatgttaacattcaggcttttgtcttgatgcccgtcttttggtttacgtcatcattgtagccatatggtaaatttttatttgttaaatttttaaaaattacttagctcaaaatgtcagtggtaaatttttaaattgagtaaagtgattcttctttgctcttatttaaaatcgacagcatttctagttcctttgacattccatataatttttaggattagtttgtacttatttacaaaacagtcttgttcagatttttacagaaattgagttaagtctgtggattaatctgttaagaattggtatctttactatgttgggtcttgtagttcatgagtgcaggagtaggcctcttaatttataatagttaagcattccttaaagtatttcattaatgttaaaaattttcagcgtatagatccctatgcatttttgttagaatttgcatcctagggtgcttttttgtttgtgtgtgtgtgtaatttgagtgattgtaaatggcattgatgtttgaactttgaattgcacacaatttttggtagtatacagaaatataatatttttggacattgttttgctaccctgcaaccttattgagttcacttattatttttagctatttctttcgacagaatccttggaattttctatatagaaatgtcatctgcaaatacagaccattttttatctttcatcttacctgtaatataccttttatttcctttttgtttgtcttattgcattgcacaagctgggacttccattatagcgttgaataggaatagtgagaaaggccatccttacctggttcctgatagtaggggggacaatgttcagttttttgtttttttgttttttgtttgagacagggtctcgctctgtcacccaggctggagtgcagtggcacgatcttgtctcaccatagccttaagttcctgggctcaagtgatccccccacctcagccctcaccaccccccagtagctggtactacaagcatgcaccaccagtcccagctaatttttgtattttttggtagagacagggtttcaccatggtgcccaggctggtcttgaactcctgggctcaagcaacctgcttgcctgggtctcccaaagtgctgggattacaggcgtgagccacagtgcacagcatgttcagtttttcatcatgaagtataatgtaagttttataaaacatatgtcctctataagggtaaaaaatttcctctgttcccagttttctgagactctgtgttgctatgaataagtgtggaattttgttcagtactttttctccaccagttgatgtcattatgctattttccttctacatcctattgatggaatgtattgctttgatcaagttttgaatattgagccagccttgcatccttagaataaaccatacttgtttgtagagtataattgtttttatatatcatttgacatcattccctttgtttgtattttgttgaggaaatattcctctaatttattggctaataatgtgtagttcttttttcttttgtttcttatgttctaaatgtcttatgtgtggttttgatgtctaggtgatcttgacctttcaacatgaattggaaggagttctcttctaatttttggaagactgtgtagaattggtgttatttgttcttgtcatgtttgatgacctctagtcaaccattgggccagagatttttcttctggaggcttttaaattacatatttattttattggataggtagaactattcgaagtatctatttcttgtgtaataaattttgatagtctgtcctgttgaaggaatatttcatctgtatttgtagcactcccttattcttttgatagcaggatctgcacttctttttatttttaatatttaaaatgtgcatactcattttatgattgagtcttcttagacatttatcagttttattgcgcatcatgctgaaagatgtaatttttgcttcatctctcacttcagagaactagcactttatattaatgatttgtctctattcttgatttctttgatttctgctctgatcggtattatattccacttgctttggttgtatttggctctttctaacttttcaaggtggggttttagattattgatttgagatttttttgcttttttaatgtaagcattacattgtataaatttacctcatatcactattggtttgatcccacaagttttaatgttttcattacattttaattctaatagtttttattttttgagacattctctcttagccatgaattatttaatagtatgcttaattttctggtgtttggcatatttgttactgatttctaatttgttccatgtttgatctgactgtttaaatgtgttaacatttttttatgacccaggatagggtctatcttgtttcgtatagctgcttgaaaagaatgggtgttctgctgttactgggtggagtttctataaatgtctctatgatcctgctcattgttattcaagtcagctatgtccttgctgattttctgtccagcatttctgtcagttgctgagaggggtgttgaagtcctgaacataggccgggtgcagtggctcacgcctgtaatcctagcactttgagaccactaaggcaggtggatcacctgaggccaggagttcgagaccagcctggccaacatggcaaaaccctgtctactaaaaatacaaaaattagccaggcatggtggcgtgtgcctgtaatcccagctgctggggggctgaggcaggaggatcagttgaacgtgggaggcagaggttgcagtgagctgagatctcaccactgcactccagcctgggcaacagagcgagactctgtctcaacaacaacaacaaaaagtcctgaacatgattgtggaagtgtgttgctctttcaagttctatcactttttgtttgcaaagttcaaagctgtattgtttggtacatatacatgtaggtttgccaagtctttgtggtgaattgactcttctgtcattatgtgatgtcatttttttgccttttaatagtcttgtcaatactttacctgatgttctcatagtgactcctgcatattttgattaatgtttgcatggttaatatttcttcattttattttaaagcttacctgtatcattacttatgaagtcagtttctttgaacagcatatactcaggccatgctttttttattcattctgcatatgtctctcttaattggtatgttgaaatgatttacattaaaataattattgatattttagggcttaagtgtgcccttaaatgatttttgtgttcttttttattgttcctctgttatttggggttgtttactagtcttcctataggttacttcaccttttttttttttaataatttgatttgatacatatgtagtgttttttagtatagatcctccttgacttatgatggggttatgtcacaataaacccattgcaagttgaaaatactatgtcaaatatgcatttaatacacctaccctgctgaacatcatagccgatcttgccttcagaatgctcagaaaatttacattagcctgcagttgggcaaaatcatctaacacaaggcctactttataataaagttactgcaaagaattttaaataaaaattcaagtgtggtttctactgaatgcatgtcgcattcgcaccattgtaaagtcaagtagtaagtcgaaccatcctaagtcagggactgtctgtatatatctgcattttttagtgattgttctactattacagtgtaaatatataacttatgacagtttaataagttatcagcaatttagcactttacttccattaggttcctttagcttacctactaatgtaactatcttaagtaatagtaattcctcttcaaaaattgagcgctatgttgcaagatgtaatttttcttttccttttttttgagaccaagtctcactctgtcacccacgctggagtgctgtgatgcgatctcggctctctgcaacctctgcctcccgggttcaagcaattaactgcctcagcttccctagtaatggattacaggcgcccgccaccacgcctggctaatttttgtatttttagtagagacggggtttcaccatcttggccaggttggtcttgaactcttgacctcatgatccacccgcctcggccccccaaagtgctggggttacaggtgtgagccactgcacccggccacaagatgtaatttttactttatctctcacacgtattttacaaaacgtcatgagaaacattgtctcttgaccttttttttttttttttttttttaaagagacagagtctcactctgtcacccaggctggagtgcagtggcacgatcttggctcactgcaacctccgcctcctgggttcaagcgattctcctgcctcagcctcctgagtagctgggattacaggtgtgcgccgccacacccagctaattttgtatttttagtagagacggggtttcaccatgttgctcaggctggtctcaaactcctgaccttgtgatccgccaaccttggcctgtcgacctctttacccattccattgttcattcttctttcttgaaatcccaaaccttctattaacatttcttttcagttatacactgaactttactgtagcctttcttctagagtaacaaatgttctttgttttccttcctctaaagatgtctttatgtttccttcattcccaaagaatatttttgtggaatataagattcagagttggcagttgttttcttttagacttcagagatgtatctctctgttctgtacattattgtttaatataagaaacctactagcattcaaataatcattccctattttacaatgcatcagttctgtcaagcttcattcaaagtgtttttcattgtctctagtgttcagaagtttggctgtgatgtgcgtggcatggaagtttttgggtgtattctatttggcgctccctggtgcttgcccagctttttgatctgtaggattatgccttttgcaaaatttggggaactttcaactattatttcttcaaatattttttcaccccccagtcttgtcttttttagggacttcaataacatgagtggcagatcttgttttacactcccatgggtccttcaggctctcatcttttttctttttccagtctattttctgtcttgttaatattgattaatttttattgaccttccatggtcctcactgattgttttctttgtcatacctaatctgttgagtttgtgcagtgagttttcattttggttttgtattttccagttgtttaatttccattgggtgggttcttttgtacaccttctgtttctttgcttattttttaacgccaaagaaagactctcagagaatagacaactatattccaaagtcatggttctctggtggtttgtcttgacatttgaatagaaatgttaaactatctgggggaatagaaagcccacagtcttctgagttgtgctacaccaatatttctatgaacagatcttacaactgagagtgatctgcagatttttcagagtcatgttctccatggaatgtttgtaaaattccctagctctctgcactgagctgagatcgtgccactgcactccagcctgggcaacagagcgagactccatctcaaaaaaaaaaaaaattctctagctctctatgccttgttgtatcctcaggaaggagtcacctctcttccaggatcactcttgccttttgttattggacacattttcctacctcctgcccagtcttttttaggctctctgtcatacttcctcgcctagtctttaacttgtctctgataaccagatttttcccccataatctgtatctgtattcaagtctctatcctcatccccaaatggatttcaccccgcttgtccatcagtctctgcccatttcttctgtctcccacagacatggtctgtgtagttgttctgcacactacccgtcctcgccccttctcatttccctcactccacggacagctacaggagggcttccatcatttgtcctcttacttccttgttagaactttgtgctgctgaccaccactctgaaccaaaacttctttcttggttcttgaaagttgctgtctttctcctccagagggtctgtgtcttccttccaactcttaaacatttttgtttcccagaatccatcattggccattgctttttcacttgccatgagctctgtgaatgagatggttcctgctgaagacatttactttcaatgatctacagaatttcccaaatctatgtctccagactggatgtttctcacgtctgtggcccactgggcatcttctgcactttctctgcatttgtaaacactgagcctgtatgcgtgtctatgtggccatggccctggccgtggggatgcacccataattataatgagagcaggtgaatgtcatgtggctatgtatgagacattgttgtgaatgttttacatgcatcagctctttcaacatttacagcatctgtgtgtggtaggtaatgttgtttccttcattttgcagagcagaatatagataggctcaggttaagaatttgcccaaggttacacagttatgaagtttggatttaggaatgggaggccacgtagactggcttcagaattcatgtctttaaccactttattgcttctcatgttggggggtttgttttctggtcactatttttactaaagttgattcaacaatgctataatctgttactctcattcgacaatacatcttgactgtttcttcaacttgaggaaggtaaaccaaagccactctttaatgggtgcaaatatctgttgtaactatgtagaagatacagtgtctgggtttgaggacaggggagtgggaaaactgagtagggaagcggtaagacatgcatctggctttaggagtgtttgaagtgcctaaagatcagggtgaatttcccaaatttgaatcttgttgcccaagccacattgcaaccacctctttttctcttacctcgtccccacatccaggcactgccccattctgttcattccacctttttttttagtagaccctccatatatgtgtgtgttttggtgaatggccacacacagcaaagttatttttattgcaattttgttgttgttgtttgagacacagagtctcatactctgccacccagactgaagtgcagtggtgcgatctcagttcactgcaacctccatccccccatgttcaagcaattctcctgcctcagcctcccaagtagctgggattacaggcatgggccaccatgcccggctaatttttgtattttttgtagacacggggtttcaccatgttggccaggctggtctcacactcctgacctcaggtgatccacccgcctcggcctcccgaagtgctggcattacaggcatgagccaccacacccagcctttattgcaatttttggttccctcacagaatgtttaccatgaagctgtgcgtataggtggtaccatgtatgacataccttgacctcaaagataatctacctgggctttttttgtttgtttgttttgagatggagtctcactctgtcacccatgctggtgtgcagtggcgtgatcttggctcacagcagcctctgcctcccgggttcaagcgattctcctgcctcagcctcctgagtagctgggactacaggtgcctgcgaccacacccagctaatttttgtatttttagtagtagtgggatttcaccatgttggccaggatggcctccacctcctgacttcatgatccacccgcctcggcctcccaaagtgctgggattacaggcgtgagccaccgcacctggcctacctgggcttttttggacagatgtacatgattttagaaattgttatgaatgactgtcttgggatcctcaagaacacccccaggtttgacgatttgctgagaagactcaggtctcagcattctgtcatactcaacagctatgatttactgcagcaaaaaaatacaaagcaaatagtaaagggaaaaagccaaaattcagagaaaaccaggcacaatcttctgagtcttgtttcagtgaagtcacaggatgtgccttatttaagttccatctggtacttatgacaacacatgctatatgtccactgggaagcttattagagactcagtgccagggtttttattgggcatgttttctagcacatcccacaattctggacttccagaaggttagcaggggttcagcttttcagctgaaaacgttatccccctttcagctggggggaaaaaaaggcaccgaaaaacagggcagtgagctactcctgttttgggtgggtggagcagtagtaagcctcccaaaatctaaggtcccacactccagcaagggtgaaccttgcaaactcaaaaggatagcagtctccaacctgctgttttatacagtgacttaagtggtactaaaatgctatataagtcaaatttacgtaacattaagcaaataattttttttcagcaaaaaaataatggtcatgactttgtggtgaaggcttatgtaatgattgtaataaattcaggtggctcacgcctgtgataccagcacttttgggaggctgaggcgggtggatcacttgaggtcaggagtttgagaccagcctagccaacatggtgaaatcccatctctacaaaaatgaaaaattagccgggcgtagtggtacatgcatttagtcctagctacttgggaggctgaggcaggaaaatcgcttgaacctgggaggcagaggttgcagtgagccgagatcatgccactgcactccagcctgggtgacagagtgagactgtgtctcaaaaaaaaaaaaaaaaaaaaaatgcctcagttttgttaagaggaaaaagcaaatcctaagttacagtggaacttatgaacaccctagcctagagatttaatttagtgatgaaaaggtacagagagagtctttcaagaaaggacctagtctgctcgcgttctctctctctctctctctatatatatatatgtatatgtgtgtgtacatatggaccacttcaagctacacacacacacacacatatacacgtgtatgaatatatatatatggctataagtggtgcgacttgcaggtactccctttgttcacctttgtaaagatgttattgccagttcagtgtgtatttctatagtatatatgtaaacaatttgtcatccttttgttgctgcttttgaaactagttcatggcttcagtgggggagagatttaaataatatgggtttataatttctgcattattaaatgcagataacttgtgattaaagagtatgttattggaatcatgtttgcctgagttttactttggaggagttgaacagctgactccagccgagaggtcccctacagagacgggatgttggagacccacgggaatctggcttgtgggaattgcacagcaccctttttatcataccgcagcatggcctttcctgtctcgattgtgggaagctggagtgcctctgcaatgttcagtagtgtgcttgggttttgagggtcaaagatttttaatctttgccacaggcatgttacacatcttaaaattgtgtggtctcaactgaactgctccaaggagaagaaacactgccttgggcgcccagtgttggattacaggtgtgagccaccacacccaggctgtattgccactttcgagcgaagaaatgggcaaggcagaataaacaagttatgaattggctagtctgaataatttcagggagctccagagtatatagactgcttttagctagtaactagtactggggtactagttcccagctaaaagtaactgagtaagaagggggatagtagctccacatgtgagaacttgccaaagacagttgaggggtagggctgtggaatggctggtttgcatgtgacaggcaagatagcggaggagaaataccctcttgagtaagggttacgagccatgggccttgtgttgactggccaggtgactttaatgaaattttgtcacccaggctggagtgcagtggcacattcatagctcactgcagcctcaatctctcgggctcaggtgatcctcccgcctcaacttcctgagtagctgggattacaggtgcttgccaccatgcccagctgattctttttttttttttttaaatctagagatgagatatctgtgttcgaaacccagtctggtgtcgaactcctgagatcaagtggtcctcctgcctcagcctcccaaagtgctgggattacaggcatgagctactttgcctggctcagcatgtgtttttattctgatattttgacaaatgagaccttgctgatcctggagacactgctcctcttagaggtagcaaaagtctcctccgcttttgctaagttatgaattgctaagccaattcataacttgtttattctgccttacccatttcttcactcgaaaatggcaatacagcccgggtgtggtagctcacacctgtaatccaacactgggcgcccaaggcaggaggctcacttgaggccaggagtttgagaccagcttgagcaacatagccagaccccatctctacaaaaaaaaaaaaaaaaaaaaaattcacggggcacaatagtgcacacctctagttgcagctacttggaggctaagataggagtgttacttgagcctgggagtttgaggctgcagtaagctgtgactgagccactgcacctcagcctggacaacagagcaagaccctggctctttaaaaataaaatgaagaaatgataacacaggctttacccacactttccccttcctcctgtctcctaaccaaccgtgagtcttccctgtttagccctgtgtggcttcatataccccctcttcatgggaactatgagttacacactcatcagtggcagtcttctgatctgttggcatcgtcaacgctaaataataaaatctacattttaaaaaacctacctgaaagcactcatgaatttcaagaatttagcaaagcaaatcagccatttccatgtcatttccaaagaactgtgtcagtgcaccaagccaaatgtgatacttaggttggaactcagtggacagccatggaaggaggagggggtcaatgccaaagaggggctctccagatgcattggtaggacccaggcgtttgagggaccattgtgttagcaaaatctcaaccatctgaggggttggggtttttaggaaggtagctcctgatgcccttctcatagcccgacactcaagaaagctcaagcacaactaattgagggccccaaatacacaacaccttccgatatcattctccccgggccacttcttaatgtttgcaagtttgaaggaagaatgccatctcccggcccgaccacatggtgttttcttgattatcctccctttcatgggcatcctccctcctttcttaagcctttagccatttgtagctgtgtggtctttcaacatctctgtactcttgttcttcctagttccatgtcctggctctcaggtataagaactcacatatgttcaaagtgtgtctcttgatctttgaaattaggcttcagcagtgacagtaatcttttttcatctcagtttcttgacttttggcatacatgtcatttcagccacctacaagcctattttccatctgcatgttcttttgctgtgtgtgtgtgtgtgtgtgtgtgtgtgtttgacataggatcttaggctgggcgcggtggctcacacctgtaatcccagcactttgggaggtcgaggcaggtggatcacttgagattaggagtttgagaccagccttgccaacatggagaaaccccgtctctactaaaaatacaaaaaattagctgagtgtggtggtgcatgcctgtaatcccagctactcgggaggctgaggcaggagaaatgcttgaacccgggaggtagaggctgcggtgaaccaagattgcgccattgcactccagcctgggcaacaagagtgaaactccatctcaaaaaacaaaaaacaaaaaaaaaatagggtcttctgatcatggctcactgcaggctcagcctcccaagtatctgagactacaggtgcacatcactatgcccagctaatttttaaattttttgtagagatgggggtctccctgtgttgcccaggctggtttcaaactcctgggctcaagcagtcctcctcccctggcccccaaagtgctggggttacaggcatgagccaccgtgcctggtcttcatctgcatgttcttttgtcattttcaaaccctttctgaattatcctcacacttcttgagtatcagacatcaccagtctgatcttccatatgtccctatgtctgtatgggcttctccagctttgagttctttgtcttttcctcactctcttcctctaatggaggagcctcttggggctcatgtcacgctcccattacctcttccttgtgttatttctctccacgtcccgcaactcccctctccttgtaaactccccggctacagcaccacgctttttaccactctggtgaaggtcagcagtggctccctgtttatgaatcctaagtccttgtcttttctgggctatggacaggacttgaaactgttgttgtccagtcctttctccagatgtactcttggattctgtaaggttatgcttctggttttctcccctgcaccctctcactccttttcccctttcatgttggtgcatccacgtgtatccagccatttggtgttgaattttttttcttttttttttctctttgagacagagtcttgctctgtctccgggctgaagtgcaatggcatgatctcggctcactgcatcctccgcctcccaggttcaagtgattctcccgcctctgccccctgagtagctggcattacaggcatctgccattatgcccggctaatttttgtatttttgtagagacggggtttcaccatgttggccaggctggtctttaactcctgacctcaggtgatccgcctgccttggcctcctaaagggctgggcttacaggcatgagccaccgtgcctgaccggtgttgaaatttctaaggctttgtcccaggcctcttttttctcttactggtctctccccaggcctcatctgcactcttgggttcagctacctactttagtgaacataccctaaaacgtatttccccaaccctcatctcatacaagtcttactgctctcctttcactccatgcttccctttccttttcccactcgagatggagcttccaccacctgctttgcccagttagcaaatgtgtatccttcattttgtcccagagagcacaccttcacagaagcccactagagcacccagctagctcatacccattctttcatgattatctattgatttgtttggttattgaataatgaccgtatcctgaactcaatttccagcttcgaaaaagcacagaccttgatctagattttctcctaatgttccatgtgcatagtttgtagtcaatagtatgtattcagatatttgttaggtgaatgagccttaatcatttttgacattttaggttatgtgacattctctccccagtaccacctcaggctcgatgatttgcctgaaagtcaaaattcagaaaagaaagtcacacacaactcagaaaagctgttgtactcatggttacagtttattaccacaaaaggatagagaccaagatcaccaaaggtaaaaggcacataggaggaaatctgtgagaaaccaggcacaattttttttcttttttctttttctttttttttttttttttttttgagatggagtctcgctgtgtcacccaggctggagtgcaatggcacaatctcggctcactgcaacctctgcctcccaggttcaggtgatcctctgcctcagcctcccaagtagctgggattacaggcatgtgccaccacactggctgatttttgtgtttttagcagagatggggttacaccatgttggccaggccagtctggaactcctgacttcaagtgatccacccgccttggcctcccaaagtgctgggattacgggtggaagccactgtgtccagcacaggcacaaacttagcaggtgttccctcccagtgcagttgcacaagggcacactgaattctcccagcaaagttgtgtgcaacacattcacagtattgccagccagggaagctcccccaagccttgacgtctagagttttcgttaagggtcattgaggtaggaatgcagaacccacatgaataaccataaatatccagtctacaacccttgcagaaaacaaacatatagcatggcccagggcctcatgcatgcaaaagccagcatccaccatgaatcatattgttagcataaattatctggtcaaacgtgcagcaggacctacttatggttttcgacataaaaatcttaccaggcaagataccccaagaggttgttttcctgaagttggccctaattcattctagggtcagatatcagatagctgcggacagtgcctgtgtcctaaaacctgccaacattattcacagtagcaaatcctattctgtttatgctgcccctgccctgccttgccttgcctttctggtggaaaacacagcgcaggctctgggccttgctttctcctctgctgctgctttctaacctgctctggtgcttccacccgcatggtgtgctctgcctcctgtttctagggatctcttactataaacttcctccataataatcacttctgtatctgattgtcacaccctgcctgactaaatacaatcccaggtatattctagaatacacagggagcctattacaacatccttgggccaggcgcagtggctcgcgcctgtaatcccagcactttgggaggctgaggcaggactgcttgagcccaggagttcaagaccagcctgggaaatatagtgagaccccatctttaaaaagaataaatttttaaaaattggctggatgtggtggcatgcacctgtggtcccagctacttggcaggcttaggtggaagaattgcttaagcctgggagttcgaggctgtagtgggccatgatggtgtcactgcactccagcctgggtggaagagtgagactttgtctcaaaactaaaaataaaaatatgacctccttactgtggcctccaggacactacagaattcacgtccatctatctctgtgattcagtttatcttcagctgcagccatactaaccttgttgcacttccccaaacacgacaggatcctcctgctttcattcccttgtcttaggtgctctctctatgagaccctgttacctcagatgctccattcctccaagtccatgctcagatataactgtcttttagacatttcccaactactctacctccctctaaccttctatattgtttacttttgtggttgtggttgttctttttgagttactgattgttggaattaaaaggtccccgagggccagggacagtggctcacgcctgtaatcccagcaatttgggagactgaggtgggtagatcatctgtggtcaggagttcgacaccagcctggccaaaatggtgaaaccctgtctctactaaaaataccaaaattagccgggcgtggtggtgtgcacctgtagtcccagctacttgggagtctgaggcaggagaattggttgaacctgggaggcagaggttgcagtgagccgagatcgcaccactgcactccagcctgggcgacagagtgaaactgcatctcaaaaaaaaaaaaaaattcctcaagtacaggaatgcataattattttgctatgtacatatctgattttttagagcagtgcctgttgcaagataggcactcaatcgatactcattaaattaacaatatacacatatataaaacagcactttcacatggttatgagtgacctaaggaaaaacagaacaggatgacgttgtagtgggggctgttttaaattgacagtttggagctgggcgcagtggctcacacctgtgatcccagtattttgggaagccgaggcgagtggatcacctgaggtcaggagttcgagaccagcctggccaacatggtgaaaccctgtctctactaaaaatacaaaaattagccgggcatggtggcaggtgcctgtaatcccagctactcaggaggctgaggcaggagaaatgtttgaacctaggaggcggaggttgcatgagctgagttcgagccactgcactccagcctgggtgacagagcaagactccgtctcaataaacaaacaaacagacaggtttgggaaagcctctgagaaaggaatggttggcctgagctaagcgccattaccctgatccacctattgtaaccacctaatgggttcattattttccctgctccccagatagagtcgacttatcaagacaggataattgcaataaagggtttaattcacatcaatcgagctaaatgagagaccagagttttattactcaaataggtctccccaaatattttgagacgagcttttttgtttttgggtttttttgtttttgtttttgttttttttgagacagagtctcgttctccttctgtcgcccaggctggagtgcagtggcatgatcttggctcactgcaacctccgcctccagggttcaagcgattctcttgcctcagccttttgagtaggtgggattacaggcatgcgccaccacacccggctaatttttgtagtagaaacggggtttcgccctgttggccaggctggtctcgaactgcctacctcaggtgatccgcccgcctcggcctcccaaagtgctgggattacaggcatgagccatcacgccaggccttcaattatatttctgcaagatatgttccctgtctaaaagaattcaatttttaatgtttttgaaacttatgtgtttgctaaacaaatacgtgggggctgattttacgatctgaggccaaatccacaaactgattacagggtccaacaaatatttggcgagtgggaggagaggggtaagtgagctggactggtggcgtcctggctgtgagcaggcacagccgcaggcttcagggagccccatcgcggtgaccctggagagtggcctgaatcggacgtgaccttgaagcaaggtggttttggggtcgccggctgcacaaggcgcgaagtggtttagggtcacgggctgcacgaggctccagcacgtcaggagtgggcgtctgttcattcccacgtgcatcgcggctctctcctagttgacgcatgcacaccccgtgggtgtatgcgttgttcattcccacaacggccatcaccacctctccgcaccctctgtctccttccttctcgggcctcacccctggccctcgctttcagtgcccagcccggaccgcagcactccagttccgccccaacccgggaaccctggactgaggctcccgtttctgtcctttctattgggcgcacttccgatggcgtcaggaatttcagccaataggagccagccaggaagtacctctctgagcggttggtgccgggtataaaagaaggccgcgcagccacggctgctcacgacgccgcggatcccgaagcctgtgtagcagtgagacatcagtgaggctgcaggacgagcaggattggaagcgccccggccagaaagtgaccccccacccctttcaggaccctgtgaacgggaacagccatccagagggttcaggaaggcgtccgcgccctcacctcttctccccatgagctcccccagagctgtggtgcagctgggcaaagctcaacctgcaggcgaagagtgtgagagccagcgccagagaaaggacgcagggaaggctggggactgggccaggggtcgggtgcacagaagacacatgtgttgacatctcccctccctctcctcctccccaacgctcttcttttctccccactccctcccttccctccaattctttctttcacctctccctcccctactctctcctccccttcctttctctctgcctcttcttcacctcctcctcccctccctaccttaccttactctttcttcttccccttacctctccctccccctctccctgccttccccttccctctctttctctcctccccttcttcccctcacctctcgctccctattcccttctctactgttctcctctcctctctttctctccccttctccttccctcccctctcccttcctatctccctcctcctcctctctttcagtggctacagcaaaccaaacagcccagcagcccagcagcccagccatgtgagtcccttgggattggtatctggaaaaggaaggaaggtgggacgtggggatgaagaacagactgggtgtgtggggtgctggctcctgggaacgagaactactgatagggctgggtctgtgtgagaagggaaagcggcagaggaaggatacaatgaaagaggaaggggagcattggcatccctgactttccctccgcctaccctacctcccaagctgaggcttttttcttcctctcctgtcaggcggcgcctcacagtcgatgactttgaaatcgggcgtcccctgggcaaggggaaatttgggaatgtgtacctggctcggctcaaggaaagccatttcattgtggccctgaaggttctcttcaagtcgcagatagagaaggaaggactggagcaccagctgcgccgggaaattgagatccaggctcatctacagtaaggacagtctctgcttcctctttcatctttgacgtctgagcccagcattttccccaaatactaaccccaagtaaaccctgcacttgtaccttgaagacttctctgcagttcattccatttacactacctcctaccctgggtcagacactcgaatcctggttcctgttctccgttctcccctcacttgctcccagatagggctgttgttattctggtcccagcataatttgccacttgtgtgaccaggcagtgacggtggcatcatatgataggcctcagggagaaatctgactcttccaacattaatccttcagacaccccaatatcctgcgcctgtataactatttccatgatgcacgccgggtgtacctgattctggaatatgctccaaggggtgagctctacaaggagctgcagaaaagcgagaaattagatgaacagcgcacagccacggtgaggtgcgggtctggaggctctggggtctctgagtttactgtgggctggtgggagctctgtttgtggctgtcaggagggtccgcattgccttctgagaagtttacttctgaatgttattgtgtaaatttaatataatggcacgtatgttctacagctttatccttggataccctaattaacctcattgtatctccagaatattaataagtactgcgtataggtttggattctttggttataagcaacagaatctaactccactgccttatgtaaagaaacatattgaaaggctctgaaggagttcactgaataaatagctagaactggcttagagataggtacaaagagatttctagagggttccggaaagggaaccatggcaatgattttcccaggagcaatggtccaatcagcttgctgtgtcaggatgagtggtcttccatctttcctcctgtttctgtttcacttcctcgggcctcaagtcctgtgagagatcatctgagtggctcaatgtaggttctatgtctggctacttgctgtgctaggacaacagggaggatctgtgtccatgttaccatccatcctataagaccacataaaaaggagaggaaaaccacaccccacacaccagtaactggtgcaatttaaaaggaggaaatggagttactggaccaaaaagattccactgtaatcatacaattcatggtaagtgttccacctcagacggaaattgtggcaggcttcacttccagggtgacttttctttgcacccacagataatagaggagttggcagatgccctgacctactgccatgacaagaaagtgattcacagagatattaagccagagaacctgctgctggggttcaggggtgaggtgaagattgcagattttggctggtctgtgcacaccccctccctgaggtaggtcaggtggtggtggtagggtgagttctgagtaccagttaggaatgacccagtttaatgtatttcatgtgtccatgtgtaaaacctagatacgaacttggggtttctattggaatactgcctttttcttttcttttcttttctttttttttttgagacagagtctaactctttcacccaggctggagtgcaggggcacaatctcggcctcccaggttaaagcggttctactgcctcagtctcccaagtagctgggataacaggcatgtgccaccacactcggctaatttttgtatttttagtagagacagggttttgctatgttggccaggctagtctcgaactcctgacctcaggtgatccgcccaccttggcttcccaaagtgctgggattacaggcgtcagccaccatgcctggctgaactactgcctttttcttttctttttttttttttttttttttgagacagagttttgctcttgttgcccaggctagattgcaatagtgtgatctcggctcactgcaacctccccctcccaggttcaagcgattctcctgcctcagcctcccaagtagctgggattacaggcatgggccatcacacccggctgattttgtatttttagtaaagacgggtttcaccatgttggtcaggctggtctccaactcctgacctcaggtaatctgcctgcctcggcctcccaaagtgctgggatcataggcatgagccacgatgcctggccaatgctgccattttcaaacacctatacttgatatgtattcgtagatttaaataatgtggtccaatcaaaccttttattttctgatctttgttaatatataactataccagtaagtttgcatgtaaataaagtcattgctccacaattccaaaggagtgcatttttctgtatgaatgattttcatacagaaattttcttaccataatttatttacttggctctcattgatacaccatcagtttgttctagatctttcttaatgctgagaatattcttgtgaaaacattctggagcatgagctaaatcactgtgtgaataattccaaaatatggatttattaatagtaggccccagtacttttctgaaccttgatccatattaaaaatttgtctctccaaactcctgtgcttgggagggactttccagggtgtcctagggtctccacatctcaatgaaagctggggaaggagaatttccctcatcctgggcctctgcttagtacttattcccttttctgccttcctctaggaggaagacaatgtgtgggacactggactacttgccgccagaaatgattgaggggagaacatatgatgaaaaggtggatttgtggtgcattggagtgctctgctatgagctgctggtgggatatccaccctttgagagcgcctcccacagtgagacttacagacgcatcctcaaggtgggacagtcacctttgggcattcatgggggagctggtcagtgatggctgctgggctgtgggcacacacacacacagggttgtcttctgtggtccagaacagcgccttaacaaggctcaaagaagagggaggacattgatcaaagaaattaaccagacttctctttcttctttcctggcctcatcaggtagatgtgaggtttccactatcaatgcctctgggggcccgggacttgatttccaggcttctcagataccagcccttggagagactgcccctggcccagatcctgaagcacccctgggttcaggcccactcccgaagggtgctgcctccctgtgctcagatggcttcctgagccctgtctgcctctgttccctttgtgtgtgttcagggagctctcctggctctgccacctcatttgtctttatttttttctcttttaagatgtaagatgctaattaataaaagctgaatcatttcataccagctcttcatagttgtgtgagttattatgtgactgggtagaatctttatttcttgtgggaactctttcccatgagagctgcccaaggttgttctccctgctacccccaccttccacctcgggagatggtgacttcattcttctgaaaactcttgcctactttcaggtcaggcacggtggctcacgcctgtaattccagcactttggaaggccaaggcaggcgcaacacttgagttcaggagttcaaggccagcctggccaacatggtaaaaccctgtctcttctaaaaatacaaaaattagctgggcgttgtggcgggcacctataatcccacctacttgtgaggctgagacatgagaattgcttgaacctgggaggcagaggctacagtgagctgagatcgtgccattggagtccagcatgggagacagagtgagacaccgtctcaaaagaaaagaaagaaaactcttgtctactttctgcagataaattccctgagggtacataaacctgccacctatcacagtggctccttgatccaacttactattctccatgttttcaggagtatgccatttgtaaaacaggactgtcatcaacccaaaggtccactctctttttatggacatcaatatgctgctgtctcagaaataaaatgtttcactgcacgtcagtgcaacccacttcttaagtgaatacactagcacctctgtgttgtgttgcactctgatgacattagaataagtcattcctcataataaatgtaatatcacctcttctgaaattactgcatgctgcaatttggggagtggccttccagccttctgtaaccttctgtgacagcttcatgtggcagctgctccctgcacccattataaactgactaccacagtaagcatctagactcctcagctgtaagctcaaatgttttttgatcaatgcagtcagttacaccagtatttctcctaactttagttgttaagcactttatatggagtttgccttgttaatgttactcctatcattatattctacaaagtctcctcattgtgaaatatccagcagttgcaggcatgatttctgctatgaccagacccactacgtaagcataaataactcagccacttcacttggatgaaaagctcccactattgcagatctataagttaaatactccaagacattggttcatggtttttaacctgcactttcagtatttacctcttttttgttttttctttcttttacctgcatggggagacacagtgcttacctctatatgctttgcttcatcctatcagttttcctgaattaacattttaaacacttggcaattcctaataaattaactggttcacacatataaactcttacacattttaggtgctggataaacacatcactgggcacatttttggcaggtaaggatagaaaaatcactagggcctcagcactgatcaccagatgatatatgtttaaataatgaaaactctgtcatgctttacatgagggatttgaaagtgtccccaggccgggcgtagtggctcacacctgtaatcccagcaatttgggaggctgaggcaggcagataaacatgtgaggtcaggagttcgagaccagcctgaccaacatggtaaaaacctgtcttgactgaaaaatacaaaaattagctggccatggtggctgtaatcccagctacttgcgaggctgaggcacgagaatcacttgaacctgggaggtggaggttgcagggagccgacattgcgccactgtactccagcctgggcaacaaagtgagactctgtctcaaaaaaaaaaaattgtcaccaatatctacatagctttcttcagcagcactgattccagacattccatgatggaatataaatatactaactttaatatctgttctgcatccaaagcgaaaactaatttaaccctacgggtcatacacatatggaaaggagaattattcctctcttctaaattgggcaaattagtattgtcaatgatgagtaacagtgtcaacagcttgcacgctaattaagcaacatttctcaataatctcattttacaaataataccttctagaaaattgattccatctacatttccacccagttaacatcctgtcatgatactttctccactttcaaatctctggagggcattttctgcacaccttgtttccattttcataaccatatgtattgtcaaatcattgaaagctggattttattctctaaccttcatagtcatgagaagaaaaaaaacagtcaccaacggagactacaaaggttttgtataatatgattttttttttttgagacggaatcttgctctctggcccgatctcggcccactgccgtctccgcctcccagattcaagcgagtctcctgcctcagcctcccaagtagctgggattacaggaacccgccaccatgcccagctaatttttgtatttttagtagagacggggtttcaccatgttggccaggctggtctcaaacacctggcctcagctgatccacccgcctttacctcccaaagtgttgggattacagccgtgagccactgcactcggcctgtataattcttaaaagattgttatgaccctaacatgactttgttgctttcttgtttgcaaccagttagttcagggttgtcaaaaggccaaaattacaacaaatttagttttagatctaattgacttttgtttgtgattcatgaattgaggcaatctctgttctacacaatagaaattagagttcccactgggcaatggcagaacagtgggttttgtaaggtgggaacaataaaatagaacaatagaaaaaaaagctgattggttaacagattactttttctaagggttaaagcagaggggacttcctaatttcactaattcaggtagactgaaatctgcttttaggaaaaactgggatctgtctgcttccttaaaacttcagtttgattagatgacatttagtatgagagacgccattttgatttggtcagtgaggcctgctgtaggagctccaaaacaatggcctcctgtaatttttgtttaacaatgttcacctctttccattcctttctccatctatgctcattttttttcatggtcttgtccagtatcataacttgaaataacagtgtttgccaaaaacttccagatttttatgtccaggcacaacttctctcccaatattcagtcagagattgaactgctgtgacacagacactctgtggtcatacagacatttcaaactgatcatgcttaaagttggagtcatgagctcacccagtccaagactccccacgttaaggaatgtcaaatctactctaccagggctctcagccaatacctaaagcaaaagttgctggaccatgtgaagaccaagcttggccaaagaaggcccaagagagacaatgcatttgcaacatgtcccagctggacagggtcttgctctattgcccagactggagtgcagtggtgcaattacaggtcattgcagcctcgacctcctgggctcaagagatcctcccatctcagcctcctgagtaactggaattacaggggtgtgccacaatgctcagctaattaaaaattttttttgagtaggctggatgctgtggctcatgcctgtaatcccagcactttgggaggccaaggtgagtggatcacttgagcacaggagttcaagaccagcctgggcagcatggtgaaactgactacaaaaactacaaaacaaaacaaaaaaaccctcaatttgctgggcgtggtggtgcgtgcctgcagtcccagctacttgggtggctgaggtgggaggatcacttgaaccctggagtttgaggctgcagtgagctgtgatcgcgccactgcactatggcctgagcaacagagcgagaccctgtctcaaaaaatatatatataaatatatatataaatatatatgtgcatatatatacgtatatatacatatgtatatatacgtatatatgtatatatgtatatataaatatatgtatatataagtagagagagagagagagagagagacggagtctcactctgtcgcccaggctggagtgcagtggcgcgatctcggctcactgcaagttccgcctcccgggttcacatcattctcctgcctcagcctcccgagtagctgggactacaggcgccagccaccacgcccggctaattttttgcatttttagtaaagacggggtttcatcgtgttagccaggatggtctcgatctcctgatctcgtgatctacccgcctcggcctcccaaagtgctgggattacaggcgtgagccaccgcgctctattttttttcttttctttttcttttttttttttttttggtaccaatgaggtctcgctctgtcgcccagactgttctcaaactcctgtcctcaagcgatcctcctgccacagacttctgggaccacaggtgtgcgccagcacactcagcttattttaaaaaaattttttttttttttggtagtctccctatgttgctcaagctggtcttgagctcctgggctcaagcgatccgccccccttggcctcccaatgcgctgggatcccaggcctgaggcatcgcgccgcccgacgtccccctttggttactctgactgcccgctgatctgtataagaggatccggaggggaaataatgcaaggtggaagtcagagtccggagcctggtccagggtctctgcactggccctgaccctggcaaatgtccctgactcctggggctcgatttcctccggccaagaatggacggtctcgcgcttggtccctggcctccgagttgtgcccccaggacagaggcaggtctgagccgggctgtaggcccgctgcgacttttacaccgaggcctgccggctcaggatctgtcccctttgcaggtggtttgtagagaaaaactacattaactacaaggcattgccaggtgcgacggcgggccctggggccaatgatggtccaggacaggggcgtttcctgtgggttgcgaagcttggggcgggacttccggcatttggatgggacgtaatttgggagcgacggttccgtccacgccggctctagggagggggcggtgttccgtggccgcctccctggcggcgctggggaaatgagcaggtaggaggccgacagcgacctccgcgtctcggagcgaaccgtgagcctccccgtaacgagagagtttgactgtcagccaaggtcaccgggcccggcgcagggaaggggtggggctcggctgagcccgcgagacccgccctgctcgccgcagcccccgccccgctagggccacagggtcccggtatggcgatggctttgacggacccggcgcaggtgagtggacaaggtttcggccttgctgcttttctgctagttcggggaagcctcctgggcaggccggaagccaagacagccacaggattcctctttgtagttttgtttgtttacgaaacgtggagcaggctcgtcacttagtttatctcctgtcgtggtagtacctgagagactgaatattgaagcggacagtaggcagactatacatcgattatagggctgtgacgtacaatttttttgtagcaacctgcccaggaaaccagcctcctgttctgcaataaactactctggaagccagtctgccttaagttagtcttgcaaggagctagattactctctggtgacatttcaggaggctaaacggtaactcctggaacagtaggccccaaataggacttgatttgtaactgactgttctaatttttgcctccgcctccaaaagaggaccaagcagagaaagccatacgtgctcagcctaaccaatcacatacgatgccccacttctagttagcccttctgcagctttccactgctaaagtgtcaggcctctgaaagctgcttaataattgcttgaaggatggatgaagttccactccagggactcccgtcacacacatcatccgaactcagccttggcctgcaagtccctacccggtccactatggctgaccacctctgtccttgtttccttcctttcctccctggctcagcgcttcagacacaggtccactatggctgaccacctctgtccttgtttccttcctttcctccctggctcagcccttcagacatatcaatctgatcacgcagagttctttcctacccctcagccttcacctttacagttcattcagcctcagacactatcctcagatctctgcaagaccctttcacatcttgttggctctgctcaaatgtcacttctttaaagcggcctttcatggcagttcagactaaagtagtccccttctcacctgcccttggtctagcgtttttgtatagagaatctggcaaagttttagacacctactgagttgaggtcttaaaggattttgtggggacaaagagcataaataataacacaagaactgtaacggttggccttcattgagtccttgatgtgaactgagaaatgggcattatttatcatctcatttaatcctgatctccttaaagtgacattctattataaacactgctgtacacaagaggaggtcaagactccgacctgtttagttacctgctgaaagtcacatagcacttaagtaacaaactcatatttagcgtgtggaccaccagagcctttgtttttacagacagttggctgagaagccctgaggtgaactttgcagtctttccagcaagtcacagtggccattggaagcgaaaggcagacattccactagagaggactgtgtagacaaaggcaaagtgtgttggttgtttaaggaggtccaagaggacttatgaggttaccatggttccccccatccccacctgctgagacatggcctggaagggcaaaatcctgtggtcttttgttggatgttcgtcctgccttcagcctatagggcattttggccagtcataagcctgggttctcatgaccacagcctgcattatcttcagccacttgagttttctggtcctgaagcacactggccttagggatacctgctggcaggactcagggaaggaaaaggctaatggttcattatgcaatctccctggggtccaggggagaggatgagctggtccaggcactgcccctcgtcaggcatttggtacttgtgaatttggtgatgagggttttgcccacatcttggggatattttcaggagctgctaaaatagattaaatagcaaaaatatgtagaaatgcttcacaactgtattatagtagattcacgtgggtggtggaggattattggggtcacagtattaaaccctgaagcagagggacctgggttaaaatcctgtctcttatatataaatcatgcttataacatgtaaaactctggctgaacttggtgctcacacctgtagccccagtgctgtgggaggctgaggtgagaggatcacttgaggctaggagttcgagaccagcctgggcaacatagcaagatcccagctctaccaaaaagaaatagttgggcgcagtggtgcgttcctgtagtcccagctacttgggcggctaaggcagaaggattgcttgagcccaggagttcaaggttacagtgaactctgagcatgccattacactccagtctgggtaatagagtgagaccctgtctctgaaacaaacaaacagaaaacacaaaagactaggagaatctgtggagctcccttagcctcaggtcagtgactgtgacatggaggtgattggcggtggtgtttagtaatacttcaggggctgtgggaggattaataaaatcccaaagtccagtaagctctgaataactcatgtctgttattgggaaaatgggaattctgtattcatctgaaaattgaggcagagataaatgaggtccctgaggtcacaaaactggcaagtgtcagtttcaggagtttggattcaaacttgagaagtctgacttcagagtttgggacttgtagttgctttaaaacagaacatgaagcttcagcatgagctggaccagtgaggctcaggcactgtggttgtcaacattattgctattattattgtcactatttcctcatttctttgaggtcctcgaactctaattgtctacatctcgccatccacgagttattgccattgtcttctgttattctttgatggctcctatataggaggcttttctcttttacattacagtaatctgtccaaagcaatgtctgccttcctccttcagcctggtacaaagttaggccctcaggaggccctcagtgacttgggccttgatcttgttgcaccttttccagcaaagcacatgcaatagtcccacagcaaactctactacctctatttgacatttcaggtgtctgtgacctttgatgatgtggctgtgactttcacccaggaggagtggggccagctggacctagctcagcggaccctgtaccaggaggtgatgctggaaaactgtgggctcctggtatctctgggtaaggccttccccctccaccatgcaggggatctgccacctccttcgttccaccctctgactccaggcctgatgggtcaagaagtcctctcttactggccttgcctccttcccacaaattcagtcattttctacaacactcacctcttccttttttttttttttttttttttgagagggagtcttactctgtcacccaggctggatgcattagcacgaactcgggtcactgcaacctccgcctcccaggttcaagcgattcttctgcctcagcctcccaagtagctgggaagctgggattacaggtgcccaccaccatgcctggctaatttttgtattttcagtagagatggggtttcaccatgctggccaggctggtctcaaactcctgacctcaggtgatccgcccgcctcggtctcccaaagtgctgggattacaggtgtgagccaccacgcctggcctacactcacctcttcctatacagtctccatgcatcgctttggacaagaaataagagtactctttggctctcagccaaaggagagaagctggtggaaggaaatggggtgttttgcagacctcaaaggtaggattgccagctgtatgttatgaggggttgaagtaggaactgagaaccgccacgatggggtcctggtttctctgtctgggtctgctcatgtcactgtctactctgtatggttttttctgcctcagcgagttcaggggaagagtaaccaccccaggttttactgtttgtgacccctccttcccctccagatttcttgtctgtttctctggcctctgtggggcgtgtttgaggcagcaaatgctgctccacctccagctcatacttgcctccatctctcacccactgcccagcatagactggcctctgtctgcagttttttttttgagttccagagcgggatctgcctgggtgggcctggttgctcatgtatctgctccacagcccagtctgtggtgtaagggttggtgggatgttcactaagaagggttgagtcaggcaggccccaaggagacattgaccttccgtcccaccaggtgttattctaaacaaccttcacgtccttcaatcaccttcacatcctctgattctaaagtcactctgctgcagccttgctgggcttcttgctatttccccaagtgcccacccacctcaggccattgcatttgctgttctctttgatgagtgttctcagggtaattcagcatttcacatggccgccccttctcagcaccacttgcctcctcacccagcccttccctgaccaccgaatcttggggaggcccctttctcaccatagcctcctccctttacctttttaatgtctttctaagctagtgtttctcaaacagggacgatgttgagcttcagtggacactgggcaatgtgtggagacattttggttgttaaaactaagatgatgggccaggtgcgatagctcatgcctgtaatcccagcactttgggaggccgagatgggcggatcacaaggtcaggagatagagaccatcctggctaacacggtgcaaccctgtctctactaaaaatacaaaaaattagccgggcgtggtggcgggtgcctgtagtcccagctactcgggaggctgaggcaggagaatggcgtgaacccaggaggcggagcttgcagtgagctgagattgcaccactgcactccagcctgggcgacagagcgagactccatctcaaaaaaaaaaaaaacctaagatgataacattgacagctagtgggtggagatgctgctaaacatccttataatgcacaggacagatcctttctcctcctcttcccccgatctcacaaacaaagaattacctggacctaaatgtcaattgtgctaaggcgagaagctctttttcagagagtgcttggacagacactacatcagctggtgctgagagacacttgaggaagttgttcttttatttcttctcgtcttgtctccttagcatttgaggaaaactctggtttagtgctgagacttaacgtcctgcaaactgttggtaatttccccttttctacagagggagcagccttaggctcacagccctgaacaagcagcatgagctcacagggaccaaagagcactgtttgtttgtcttgagacagagtctcgctgttgcctcggctggagtgcagtggtttgatcttggctcactgcaacctgtgcctcctggattcaagcatttctcatgcctcagcctcctgagtagctaggattacaggcaggtgccaccacgcccagctaatttttgtatacgttgttttgatttattgctacattttcatggttacctgccatcaagacaagtgactctggattttccatttaccagagtgataaggattccatttttgaagaaatctaagaaaaataaaaagtggatcacttttaagaaaagcagcccgggcatggtggctcatgcctgcaatctcagcactttgggagggcaaggcaggcagatcacgaggtcagttgatagcgaccatcctggccaacatggtgaaaccccgtctgtactaaatatacaaaaattagctgggtgtggtagcgcatgcctgtaatcccagctactcaggaggtggaggcaggagaatcacttgaaccagggagttggaggttgcagtgagctgagatcgcgctactgcactccagcctgatgacagagcgagacttcgtctcaaaaaaaaaaaaaaaaaaagaaaagcagttaacagtccagatccccagagcactgattgggtgtctcaggcctgttccaggcagtgttcatgctccatttattctcacaggatccctgtcctcagcaaagtaaggaaaatttagccactcctgtgagtccctcatccagtttaacttactcagcacagatgaaacaccttcattttatgaagctatcactgaatgtttttgtgtagaaaaaattcttctcttgtgaacttttttttttttttttgagatggagtttcactcttgtctcccagactggagtgcagtggtgcaagatcatagctcactgcgatcctcacaccttaccgtctccagtagctgggactacagatgcgagccactgcgctgctatatgaagtttctgtaaatatccttatgtcaccatatcacagtaggatgttcagtctttaaatattttaatggttcgtgaaatgctggggtctggagtcactgacctgcccctcatcctggccgctggtccctgaggatgaatcctccagctcacatctctgcctcgtcaccaccctctgccacccactctggtgctcgtggtttcctccttactgtatttcttgggagagtagggtttgaagccagaacgctggtgtccagccccagctctgctctttaaaaactccatggccttgggcaagttactgaacttgcctgtgcctcagtgttctcattgttcaaatgaggacttaaccatattcgcatcccagggctgttgccagggtcaagggttattttatgaaaaggctcagaacagcacctgggagaccaggctgcgtgcagggagccattacaatctctgtttccaccagtactattaccgtcgtcctcatcatgattattgtcgttggcatgccttgacctggcactttctgggcagcgttgtggagctttgtggttaaacagcacagacagagatggcaggacctgggtttccttattgactcagccattctccagttctgtgctcttcagcaaatcactttacctccccgagcctgggtttctttgtcaacaaaatggtgttgattatgatatggacttcctgggtataccgtgaggaaatcctcaactggaatcctcatttaatggctaggcatggtggctcacgcctgtaatcctagcactctgggaggcctaggcgggtggatcacctgaggtcaggaattcaggactagcctggccatcatagtgaaacctcatttttactaaaaatacaaaaaaattagccaggcatgatggcacgcgcctttagtcccagctactcaggaggctgagtgagcggagatcgcgccactgcactccagcctgggcaacagacgcatttagtctttggtttagaggaagagcattataaaacattgcttaggatgttaaaaaaaaaaaaaaaagacttagataagtgaagatacataccttgttctgaatgaaaataatcaatgtttaatatttaaagtgtatcactttttctctaagatattccataaatattgttcactttttaatgcatttaaatgcttggcatagtcccctggacatggttatagcctataaatactagtttttgacttactattaggagtagagattctgtggcagcatgacatgccctgcccttggtttctagatcacgtgctaactttttgttcccatggatgggtgtagcttcattccaaggtctggtccccatcctgaagtcccagactagattgaaggtctttatttcttttcacccacatccatgtgtccacttgctttctccataaacagggtgtcctgttcccagacctgagctgatctaccacctagagcatgggcaggagccatggaccaggaaggaagacctctcccaaggcacctgtccaggtaggagccaagatctgggcaggtcggagtccctgctggcttgagacttcgaggagaccactggccctgggatctcttgggaagcttctcactgtggcttctctaagggtttgggagccttggagccctttaacctgtggtttctccgtcctcccagccccatcgcacttgtcgccactcctggggaggagtgaggtgtgtgaactgagactggtcctggggctgcagccttgtgtgccggaaccctggttagccagtcatctactctgtgaccccagtgaagtttgtatatgagtttggctaagttaataccaactgctgtatccaacaaactccaaaatttaaatgattcacacatgaaaactctttttcactcataccaaggtctgtgtgggtcagcagggaactctgtaccacacagttattcaggacctagagtccttctgtcatcaacctgttgctttaaggttgtcctgacatcttcttgctggtagagaattaagggaataaggaaagtcatacccacttccagacctcccctcacatctcacccatgggaactgggcatttggctgtacttgggtccatgagtctaggaattgtggctgagctgcctgtccaaggagaagagcagatggtctggtgagcacctactcagtccactacactcagtctgttcctgaaaaatgatattagaaattatttttataaaaaacaaaaaagaaaaacattatttttatgccattgggcagtttgaagttgtaatcatgtgatacattaatgcataaaactgcatagtttctgagccatagtaagtgacttatcaaaataagctatgagtgttactcatgtcatataaacattgatgagtgatgatacgttacatttccttctgaactctggggaatagggcctttcttactctcccaatttctctttccacttatattctgcctatcagcctctcccaccttctccttccacccattccctgagtgtcaatcagacactaagaagcagtagtttgcccatgtcttcctatatctcctgttttccaaaaacctcagggtgacatttgaccttctgtgtcccacactcaggctgctgagggcactgaggccatctgtcatgtgtgtggattggtgccactgcagagccttggcctctgcccgcgtgggttccttgagctgctcatccaaccctgagtgtctgtgcagtccctgttcagcccttcagagtctgttccagattgtcccctcctcagtgccacatctgcacttgaaaatctcaaaagcacaaaactcaacatgcctaacaaggaacccatgatcttgctcactcctgccacctcccaagtttccgtgaatggttctgccatccaggcagattaggggactggccccaacctcagacaagtcaacccctccacctccatgagtccctgcatccagcctatctccacagcctttcgatttcacgtcatgcatgcctcctgaattcatccctctatcacctccatgagacctatccttctgcttttttcttttttgagatggagttttgctcttgttgcccaggctggagtgcaatggcgcgatctcggctcaccgcaacctccgcctcccaggttcaagcgtttctcctgcctcagccttccgaatagctgggattataggcatgcaccaccacatccggctaattttgtatttttagtagagatggagtttcaccatgttggtcaggctggtctcgaactcccgacctcaggtgatctgcccgcctcggcctcccaaagtgctgggattacaggcgtgagacaccgggcccggcccccttatggtcttactctaaactcttatcatcttttttctaggggatgttaatagactcccaaaacttaatctctgtatctgctttgtgcctctggtcagctctttgtcctgcgtggggtactccagcattcagaccttgttccagacagttaatatttccccagcaactcagcatatgactgctgatgtattagcaggttttcgtgttgacagtgtcatctacttctattgtttaatcggcagtccttacacattcctctcaacctctcatatcggtagcttctcttttcccctggtggaagaggtcttacccttggccacggccagttttttcaagagtttatattatacgttttcatggacgttttttcttcacttatattccgcttgttttgtaacttcatcctttctgtactcaacataaaaatatgctcaacttccttacccttgaagaaaattcaacaattcagtgttcatggttcacagtgtattcatatattcattcactgtctgagcacttaattgtttacatgtttttatatcagtgatgctgtggacatttatgtatgttgttcatctttcacatgtgtagggacacatttttgatgtttctggagtgaaataattggattatagattatgcaaatgttctagtttgcaagatcattctcattgttttctaaagggcctatatcaaaaaattcctctcaggaatttttggaaggttccattgatccatatcctatctaatacttgaaactataaggcccctcaatttttgccgattaaatggacacaaaatattatctgttgtgctcttgatttgcattttcctcattggtagggtggtttagtgtctttcatgattctgagccaatctatattttcttctgtgagatgttatttggtgataaatgcctttttttcaattaacttctttggctttctctttttgattttatttttgtacattatagatacctatcttttatcagttacatttgctgccggtatattcttctagtttttaattttgtccttccactctttttaaagtatcttttgttcaatgagttccttacatagcgtagtctgatttatgttttttttttacgtgattaatgattttgtaccttgtggaaaaaatgttgctttaccctaatgtcaaaaaggtattcttgtttattttattgtaagttgtaaaacttgccatttggcattcaagtctttatcaatctgaagttgattttgagtatagaatgtgatagaatacaatatttccattccccgtgttggtagccaatttttctagctctaattccttagtagtctctcatcactgaggtgctgtgcctctttgccatctaccaaagccccatctatgtgcaaggggatttctgagctctctgttcttctttattcccagtttgcattatgtctgtgccagagtggtacctctgccttatgagctctgtcctgagagtggcactgctcttcacagctgtcacctaggtcagaatcttgggaatcagtccccctgtgcctcatctttccctagattctcatcaccaccaccctctcatgcactgtagctcatttgcatattctttctcctaaggctatagtgtctttctcacattctctcgtgacaagtgggacttacttcactgggtaccttctattggaaaactgccttgatctttttctacccaggattagccaaactcaagataaggacacagtcctccaggactttgtcaagtctacccaaatcctcttaattccaactgcaaattcagggatttcctgaaaccaaccttaggtttcataacttgctaaaaagactcacaacactttctaaaacctattatactcacagttttgtttattacagacaaagcatacaaattagaagaggacacgggatgtggggctgaaggggttccaaacacaaagcttcctcagtaacttgttacccacccagcattgagtgtaaaatatgtgcacagagcattgcaaacccaggaaactcactggagctctggtttttagagtttgttgagcttcattacacaagcacggttaatcgagacattgcccacattgccatgtgaagtttccagccttcgtcccttttccagagttcagctgatatcttgtggctcagagacctaaccttctactcactggttggtctttctggtgccaccagacctcagccagagtcatctatttaggataaactatttaggtacctataatgagttacctttatataaatatttagtctggaattgaagcgatatctccactctaggccctgtcccctcacctggtctctctgcctggtctccctttcaaggagtcaggaatccaaggaaaataaaagaaacaaattatagatctggggttcaagatggcaaaatataacagacataaaggcaccatttataacttcattttttttactgaagtggtgagtttgtttcttctctttttacattactaacaagcccttctgtgtgttggatttctttcaggtgacaaaggaaaacccaagagcacagaacctaccacctgtgagctagccttgtctgaaggaatctctttttggggacaactaacacaaggagcttcaggggactcccagttggggcaacccaaggatcaggatgggttttcagaaatgcagggagaacgcttgagaccagggttagattcccaaaaggagaagcttcctggaaaaatgagccccaaacatgatggtttagggacagctgatagtgtgtgttcaaggattatacaggatcgagtctccttaggagatgatgtccatgactgtgactcacatggatcaggtaaaaatccagttattcaggaagaggaaaatatctttaaatgcaatgaatgtgaaaaagtgtttaacaagaaacgcctgcttgctcggcatgagaggattcactctggagtgaagccctatgaatgcacagagtgtggaaaaacctttagcaagagtacatacctcctgcagcaccacatggtccacactggggagaagccctataagtgcatggagtgtgggaaggcttttaatcggaagtcacaccttacccagcaccagcggattcacagtggagagaagccttataagtgcagtgaatgtggaaaggccttcacccaccgctccacttttgtcttgcataacaggagccacactggagaaaaaccctttgtgtgcaaagagtgtggcaaagcctttcgagataggccaggtttcattcgacactacatcatccacagtggtgagaatccctacgagtgcttcgaatgtggcaaggtcttcaaacacagatcatacctcatgtggcaccagcagactcataccggggagaagccctatgagtgcagtgaatgtgggaaggccttctgtgagagcgcagcgctgattcaccactatgtcatccacactggagagaagccctttgagtgcctcgagtgtgggaaggctttcaaccaccgatcctacctcaaaaggcaccagcggattcacactggggagaagccatatgtgtgtagtgaatgcggaaaggccttcacccactgctctactttcatcttgcataaaagggcccacactggagaaaaacctttcgagtgcaaagagtgtgggaaagcctttagcaatagggcagacctcattcgccacttcagcatccacactggagagaagccctatgagtgcatggagtgtggaaaggccttcaaccgcaggtcaggcctcacaaggcaccagcggattcatagtggagagaagccctatgaatgcatcgagtgtgggaaaacattttgctggagcacaaacctcattcgacactctatcatccacactggagagaagccgtatgagtgcagtgaatgtggaaaggccttcagtcgcagctcgtccctcactcagcatcaaaggatgcatactgggagaaatcctatcagtgtaacagatgtgggaagaccttttacaagtgggcagacctcagtcaacatccaagaacttttattggggaaaaactttttgaatgtcaccactgaggaaaatcttttgcaagaggaagcatcttacatggcatctgatcgtacataccaaagagaaaccccacaagtgtcttcactgtgagaaaaccttctgttgccaaatgtcatttgtcacctaaggagtcatattagaaaatcacgcagcttagagccttattctccatccgaattcatcctggaaaaacacccagtggttattacgcacttgggaaaacctttagctccatctttctcattagtttacagtgcaatgttatctcaggaatttttataaacagaaagaggtgacatagaaaagaaaatgaaatgcagacactgcttttatactgttgtcttgtatgtacatttctgtcctgtgtcaggaaagttagtaagggaaggtctggaaacttactcaatgtctttgttctacaacattgtctcttcttaagaagcattgtttttatgagaaataatgaagccttgagttatgaaatacttttatatttaaggattaaaagaaacatgaatgcgcacattttattgtaccacttaatactgtttaggtctttgattttttaaaaaaattcttttttaatgggttttaaacactaacactgagaatttttcttgattcccatctgttggtttacttgattgctatagctgtatggtaaatctcaaaattaggtaatgtgatttcttttttcttactatttttatttaaaattcatttagcattcctagtttgactttccatatacactttaggattggtttttctgtttttcaaatattcttgcttggattttgatagaaattgagttaaatctatagatcaatgtgttggaaattggcatcttagtcttccaattcatgaacatagcctatcttttcattatttaaattttctttgatatatttcattactgttttatagtttacacagtataactcctgcacatttaaaataagaattatagctgcatagttttttgagtgattgtaaatggcattgatatttaaagtttcaatattcacatgatgttggctagtatacagaaacattattttttcaatcttattttgctgtcttgcaaccttcctaaactcattatttcttgccatttcttttgggagaatccttaggattttaaatatagaaatgtcatttgcaatttgggacagttttatttcttgcttcccatctgtataccttttatttgcttttctcatgttattgtactaggtaggatttccagtgtgatgttgaatacgaatagtgacaagttatccatgccttgttcctgatattagggggaaatgttcagtttctcattattatgatgttgaaagttgcttccaaagagtttctctatcgagtttagaaagtttccctctattcctaatttgctgggatttttttggttattattaataagtgttgaattttgtcatatgctttttctccaccaattgatttaattatgtgatgttacttctatagtcagttgatatgatgtgttaccttgattgagtttcaagtattgaaccagcctcacatctttgtgataagccctacttgatcatggagtataattttgtttgtgtactatgctacagtatttcatttgctagtattttgttgaggaagctttcctctgatttcatgagtgataatctgtagttttctttcttcaactgttactgtttggttttgatgtctagatgataactaacctcctaacatgaattggaaggaattctcttctgtttttttggaagatcatgtgtagaattggtgttatttgttcctttaatgtttggtagctttctccagtgaagaagtgggacctggagattttccttttgaatgctttttaattatgtatttattttatttaataggtatagaactattcagagtatttcatattggatgaatttttatagattttcttaaggaagtgttcattttatgtaaatgttctaatttgtagcattctttgaaatatttccttttatcctcttgatggcagcaggatctgtacttatgttccttgttgtattcttgatattggaaatgtatcacttattattgtcagtctttgtagacatatgtcaatttcattgatcatttcaaagaaatagcactttatatcactgatttttctccagtctctgttcttaatttcactgatatctgctctgatgtgtattgtatcctttctcctacttgctctggttgtatttgactcagtggtttcctgacgtggatgtttaggttattgatttgaggctttttttcttttttaatataagctttaagttctatacatttttcttacactgctgttagtttcatcccacaagtcttaatatgcttttgattatcttactcagttctaagattgcctgattccttttgagacatcttctctaacccaggaattatttagaagtatattgtttaatagtgtttggagtattccctgctatttgttattgatttctaatttgttttgcatttgatgttactgttgaaatttgttgactttttttccttatgacccaggatataggctgtcttgttttacatagctgcttgaaaagaatgtgtgttctcggtcatttggtggagtttctgtaaaagtttgtatgatcctgttagttggtggtgttatttaggtctcctgtatccttgctgattttctgtctagtatttctatcaattgccaagagaaggatgttgaagtcctgagctataattgtggaattacctattcctcctttaagttctatcagtttttgctccacataatttaaagctctgttgtttggtatatacacatgtaggtttgcttagtattcttggtgtattgacccttttataattaagtaatgtccctttttgttcctgttaatactcttatcaatttttatctgatatttgtgtggtcagtcttacgttttggttaatgcttgcatgatttacacttcatcatttttttaaaccttatctatatcactatattgggagtaagtttcttgtgaatggcgtatatttgggctgtggttttatatccagtttgcgtatctttttttttttttttttttttttttgagacggagttttgttcttgttgcccaggctggagtggagtggtgcgatctccgctcactgcaacctccgcctcctgggttcaagtgattctcctgcctcaggctcttgagtagctgggattacaggcatccgccaccatgcctgactgattttttgtatttttagtagagatggagtttcaccatgttggccaggctggtctcgaactcctgacctcaggtgatccacctgcctcagcctcccaaagtgctaggattactggtatgagcaaccacgcacagcattttttttttttttttttttttgagacggagtcttgctctgtcgccctggctggagtgcagtggcgcagtctgcaacctctgcctcccgggttcaagccattctcttgcctcagcctcccaagtagctgggattacaggtgcctgccaccacacctagctaatttttatatttttagtagagacggggtttcatcatgttggtcaggctggtctcaaactcctgacctcaggtgatctgcccacctcagcctcccaaagtgctgggattacaggtatgtgtcactgtgtctggccccagtttgcatatttctgtcttttattggtgtatttagaccatttaaagtttacaataattatgttagtgctatgtctgctattttatgattagttttttgtgtttcctgttgcttctttcttggtttgtttgggtttttttttttttgtctttaacattttttagaattccatttgatatatttgtagtgttttttaaatatatttctttgtatttttgtattaattttttagtggttgctttaagtagtataatgtacatatgtaacataattacagttaatggtatgaaaaatttagcactttgatgtatagaaaccttacttggtcccttcaccttgcctgttaatataattgtctaaagtaattcctcttcaaaattgagcaccatgttggaaaatgtaatttttgcttccactgtcaaatatattttacaaaagtcacaggaagtattgcttgttgatctctttacccattccactattctttcttgaaattctaagccaccttctattaacattttctttctgtttggcgaacttgtgtaaccttttttctagggtcagtctgctggtgtctctaaaagtgtctttatgttcccttcattcctgagggatatttttgtgggataataggatttagggtctgcagttcttttagtacttgagaaacatgtttgttccttctgtccgctatggtttcagatgagaaatctgttgccatttgaaccattgttccctagttcataatgtgccatttttatcaacctgcgttcaaagtgttttgttttttttgtagtgttcagaagtttggttatgaggtgtgtgacatggaatttttttgagtgtatcatgtttggtttttgtttagctttttgatttgtcggtttatgccctttgccaaatttgggaatttttaaccattatttcttgaaatattttttcatccctactctttctcctctctgtgatatgaatggtagagcttttgttactgtctcagaggtctcttgtgctttcatgtttaccccctttttctggtctatttttccctttttttcatattggttaatttctgttgactttttttcagctcactgattctttttttctgccatatgcagtctactgttgagcttgtccaatgagttttcgttttggtttttgtatttttcagttgtttaatttccatttgttttgttttgttttgttttgtttttttgagacagactctttgctctgttgcccaggctggagtgcagtggcgcgatctctgctcactgcaagctctgcctcccgggttcatgccattctcctgcctcagcctcccgagtagctgggactacaggtgcccgccaccatgcccggctaattttttgtatttttagtagagacggggtttcactgtgttagccaggatggtctcgatttcctgatctggtgatccacctgcctcggcctcccgaagtgctgggattacaggtgtgagccactgtgcctggcctccatttggttcttttgtacatctttgatttctttgcttagtttataatactaaagggctcagaaaacagaaaaaactaaattccagagtcatggttttctggtggtttgtctcaatatttgaatagaaatcctaaattatctggaggagtagaagtcctgtaatcttttatattgggcttcttaaatatttctgtcaacagatcttatatcagggtgatctgcatatcattcagagttacgtactccacgggaaggttgtatgtaaaatcctccagctctgtaagccttgttatatcctcaatggagaaggggtcattccttttctaagatcactcttacacttttttattagacacacacacacccttccccaaccaaacttgtctaagtcctctgtctttcatactcttgtttagtctttaacttctccttattaaccagcttctttcccataatgtatagctttagtcggatctcaagcctcgtttccaacctatttcacccttccttgcctatcaagctctggttattctttcttccacacacatgccctgagtaactattctgtgcactgtcgccacccctttacatttccttttactccccagatactactaaatggcttccaccaccgttgcctgacttaagcacgtctcagaaaggtcccttttgaccccctcactctctttttggacctccatactgctaaatctctgacttgaaggtcctttcctggcttctgtgaattcctggcttttttcctttttagggtctgtgtctttcttccatctgtaaaacagctttacttcccagcatccatcatgatcattgctgttttctaacttgtccttcaccccatgactgagttaatttgcgctgaagacactttactctcaattatctacagtgtttccctaaatctgtgtctccaggttggatgtttctcatgtcgttaaccactggtcatccttccacaccttttctgtatttgcactcactgagcctatatgcatgtatcatgtggccatgaccttggccgtggggatgcacccataatcatcataagagaacacaaattattactgtgtatcagacattgtttcgaatgttttacatgcgtcagctcttttaacctttatgacaactccataatgttatttcccccctttaactgattagaaaactgaggtacagaaagattaaggaatttgtcaaagatttcacaattatgaaatttgggtttggggactggaagccactgcactggcttcagaatccatgtccttaaccactttattgcttctcataaggtgggtctttgtttcctggtcatcacttgtttttactaaaatgggtcaaactgtgctcatttatttataatctactattcttatttgacagtacatcttggccattccttcaagcaaatgagataaaccagactcactctttaatgcctgcataagctattgtgactgtagaaaagacggagaatgtctgggtttgaggatatgtgggaggggtggggagaaggagtagagaagggctaaggcatgcatgttgttttaggtgtgtttgagatgcctgaagaacatcagtgtatccccctaatttctgtcatgttactcaaaccagacacattgtggccatttctttttcctttatcattcccacgtccggccactgccccattcctttttgttccgtagtagaccctcaatatatatgtgtgtgttggtaaatggccatacacagcagggtattttttattattattttcagttccctcagcgcgtttaccacaaagctgtgcatataggtggcaccatatatggcgtaccttgacctcgaagagaatctacatggacttttatggacctacgtacacaattttagaaatcataataaatgaatgctggagtcctcaagaccccttccagatttgatttgctaggaagactcacaggactcagcattttgtcatactcaatggctatgatttaccacaccgaaagaatccagagcaaactcagcaaaaggctcaaacccaagtccagaggaaaccaggcacaatctttgagaatcttaatgaaatcacacaggatgtgcttcattgaagctccatctgggacttaaaacaacacacgtgagatgtgttccaggaagtcgtcttgagcacccattgctcagagtttatattggacttgctttctagcacataccacaattgtagacctccagaagaacaggaggtgttcagcgtaagacaatttaggcacacggagctacttctcattactgggaacaatgggaaacttcccaaaacctaaagtacagactccagccaaggatgaaccttgcaagatcaaagaatagcagtctctggcctgctctgttctctttttcacagtaacttaaatggaaaaatgctgagttagcttaagtttctgtaacaaacattaagcaaataaaattttctataacagaaataagccatagctttgagatgaaggcttatatacgtgtaaaccattgtaaccaagaaaaaaaaaaaaagtcagagtcacagtgaaaatacttaacaaactagccaggatttaattcagtgatgacagggaacagaggaagtcttgtgagaaaggatcttgcctctgcctagtatctttcacagataggcttcaagtggtttgatttgcagatacaccctttcttggcctttatttcggcaaagatgtgatgggtaggtaaatgccgtgttctttccctagcacgtatgtcagtttctcatccactctttgttcttgctattgaaagttgtagcttctggctacaacagagatagttgaagaatatggagttcgccataatttatcattaaatgtggataatttgagattaaagaatatgttgttgcaggcttagtcactttgatggatctgtctgtgagtttcacttggaggaagtgggagcagttggcttcagctgagagggcccttacagagacatgatgctagagaccttgagaaatctggtctcttgtatatgtaactcctctttgtactcagactccggcccacagatagcctttcctttccactgtggaaagttggggaggctccacaatgctcagtgatgtatttcaattttgagaattgaatatttttaatgattgctaagagatggattatttttgctcatagcaaaatctgtttgtgtttcatatctcacaattggaaggtctcagctaaattgtaaatggacagtttcttttgcctctttcggagtagtgtcaagagtgtggacctgggagacagactacctgcttatactttctgtccttgttcctacctgctggaaaggacattcatagccactctgcctcacttaaattggagatccatgtattcacatgtttttattatgctggctttgagagagaagatctcactgtcacccaggctggagggcagtggtgcgatcataactcactgcagcctcaaactcctgggctcaagtaatcttcccatctcagactcccaaagtgctgggattacaagcatgagccactgtactggctattctgctgtttggcaagtggagccttgctgatcctgagagactgcccatcccaggactagctaattttaagtggtagcaaaggactcccctgggtatgtgcctttgatatgcaaccaaacaattcagtgcccattcccttcccccaccccctttatcaaggcctcacacatggagccactatcttcctgccataaccactccagggtcagatattaagcaagtagggacagttcctaatgaaattcaggcctgtaatctcagcactttgggaagctgaagtgggaggatcacttgagtccaggagtttgagaccagcttgggcaacatagtgagaccccatctctacaaaaagatataataattagctaggcatggtggtgtatgcctgtactcccagctacttgggaggctgaggtgggagtattaaatgagcccaggaggttgaggctgcagtgagctatgatggtaccactgtactccagcctaggtgacaagagtgagagcctgtctcaaaataaaataaaattaaaaagccaagcctaaccctgcttagcttgcttaccttgtcttgaccattcttacctgcaaaagcacagtgaaggttcttgcccatgctttcccccagctcctgctgtttttccgatcctgctgcttccgcatgtggtcctacactgcctggtgtgtgcccctttcttgggaagtgtgtgtagctaagcatctcttcaatggcagtatctcctgatctgttggcctcaccatacctgaataataaaattggcctctcaaaatgccacctcaaaccattacatggaagttacatttccgtgtaatttctagagtactgggtacctacatcaggcaacatggtatagaaccatggattggaggatggattgatgccaaggagggactgtttaggtgaattactaggaaccagacatccaagggaccactgtgttggtgggatcccagtgatgtcagtagtcaagactttagaaaaatagttccagatgcctttctcattgttggacacttctgaaaaaggccaagcacaactaattgagggccccagatatacaaacattattctgtcatttctccaagctgtttgaagtttgaagtttgtctttctgtatattatttcccagtcctacctacatcatttgttcttttttttttttttttcttttttctttttttgagatggagttttgctcttgttgcccaggctggagtgcaatggcgcaatctcggctcaccgcaacctctgcctcccaggttcaagcaattctgtctcagcctcccgagtagctgagatcacaggcatgcaccaccatgcctggctaattttgtatttttaggagagatggggtttctccatatcgaggctggtctcaaactcctgacctcaagtgatctgcccacctcagcctcccaaagtgctgggattacaggcgtgagccaccgcgcccggcccatttgtttgcttgatattctcaggcatctgcattaactctcttttcttatgatctacggcattgcagttgtatagcctctcaacatacctgtttgcccttcccagtgccattccatgtccctgctcttgggtaaaatgacacgtgtttgaagtggtcccttctcactctgtctcttgttgatccctggaatcacacataagcagtggtcactttctttgcaatcttgagtttcctcctgacatttgccttcgatgtcatcatggccacctacaagcctgtttttcatctgcatgttcttttgtcacttacactttctaagttatctttgcataactgacttctgcttgagtgtcagtcaccaccagtctggtctttcctgtgtgtgtatgggtttctccaacttgattatttgtcctttcctccctctcctcctttaatagaggagcctcttagggatgttttccttttttgtgtaatattttcacttctccattacctctttcttgatttctctccacttcccaaacctctactctttgtggaactccttgctacaatgccaccttctccgacattgtgactaaggtcagaagtgacttggtgcttataaatcacaagtccttgtcattcttgggccatcagtagaattttattgtgtctaatactcaattcgtgaaatatgttctctttccttggctctgtaacatctttttcctcattcgttccctccctctctcccttctttgtgcagtcatccatatctagctgcccactcaatgttgaaatacctaaaggttttgtccaaggctcttttgccttgtatggcctctccccagcctcatctgtgcccttggcttcagttacctcccttactttaaaggcattgaaaatagaataccccagtcttgagcaatccttacagctctggacctgaattaccagttatcttcttgctatcttcacatagatgtttcaaagatacctcattcttcacctgatgtaaataagatcaataaaatgcttctccctgactctgatctacttcagtcttccctctttactacatggcactgtttagttacgttggctagaaatttccaactcagcatagttacctcaatctcttcctccttcatgtacaatcagaaagttgtgtttttttgtttgttttttttttaacacagaatctcgttctgtccccaggctggagcagtggtgcgaactcggctcactgcaacctccgcctcctgggttcaagcaattctcctgcctcagcctcctgagtagctgggattataggtgcatgccaccacacccagctaatttttgtatttttagtagagacggggtttcaccacgttggccagaatggtctcaatctcctgaccttgtgatctgcctgccttggcctcccaaagtgctgggattacaggtgtgagccactgccccggccccatcatttttaattcttaaatatctctcaagtatgtccacttctctctaccacctcttcctagtccatccactcaccatctatcatctcaattagtgtccttttacccacattttctcttcaatccattctctaagctgaaaccagagaaccatctcagatttaatagtgctctgcttcgccctccctctgcccccactacgtttcctgaaaactttttatggcttcaactcttgggataaaaaccaaatatggccaggtgtggtagttcacaactgtaatctcagcactttgggaggccaaggtaggaggattgcttgagcccaggtatttgagaccagcctgggcaacaaagtgagacctcatctctaaaaacaactcccaaatcattacacggtcaatcctttgggctttatctgagctttatctggtctgggaggtgcctcatttactacctttcatcttgcataacttatgccctttctgttttcactttgtgtttccttttcccacctgccatggggcttttccaccacacactttgtccagtagtgaatatttatccttcatcccagctacgtcataagcattctttcataaatatctgtgtgtgtgtgtgcatacacatgcatatatatttaggtttgattactgactcctgactgtctcaccaactagatttccagcttcaaaagagcacagatgttaatatggattttatcctaattgttccatgcacatagttcctagtcagtagtagatattcagatatctgctaaatggatacgtggatgaatggccttaatcatcttgatattttaggttacttacctcaggcttcatgatttgctagaagtacacacaagactcagaaaagctgttatggttatagtttattacaataaaaggatatagaccaggatcaccaaagggaaaaatcacatagaatgaagtccacatgaaagcaggcacaaaactctgggtgttatctcccattacggtcacatagggacacacttaattcccccagcaaagatgtgtgacaagatgttcacagtattataatacaagccagggaagttcactcaagcattcatttctggggtttttatggagggtcatttacataggaatgcagggtccacataactagtcatagccatacagcccttgcaaaaagcaaacatacagtgtggcccagggcctcgggcatgcaaaatccagcattcaccatgaggaatattgtcagaagcatttgaaccacagcaaatccgtcttgaataggggctgggcaaaatgaggctgagacctgtgctgcattcccaggaagttaggcattctaagtcacaggaggagacaggagtttggtgcaagacactgctcacaaaaaccctgctgataaaacagcttgtggtaaagaagctggccaaaaccaagacggccaaaacccaccaaaaccaagacggccaaaaccaagacggccaaaacccaccaaaaccaagacggccaaaaccaagacggccaaaacccaccaaaaccaagacggccaaaaccaagacggccaaaacccaccaaaaccaagacggccaaaaccaaggtcatcctcactgcccattatatcccaattatgcattagcatgcaaaaagtcactctcagcagcaccatgacagtttacaaatgccatggcaatgtcaggaagttaccctatatggtctaaaaaggagaggaaccctcagttctgagaactgctcacccctttcctgggaaactcgtgaataatccaaccctcctttagcatataatcaataaataactataagtagccttagtccagcagcccaaactactgctctgcctatggagtagccattttgtattccttttttttttttttttttttgagacggagtcttgctctgttgcccaggctggagtgtaatggcatgatcttggctcactgcaacctctgcttcccgggttcaagcgattctcctgcctcagcctctcgagtggctgggattacaggcatgtgccaccacgcccggctaatttttgtgtttttagtagagatggggttttgccatgatggcctggctggtctcaaactcctgacctcaggtgatccaccctcctcggcctcccaaagtgctaggattacaggcgtgagccaccgcgcctggcccctttactttcttaataaacttgctttcattatggactcaccccgaattcttttttgtggaagatccaagaaccctcttgaggtctggattgggaccccttttcagtaacaatgttcttagaataaattatctcatcaaatcgatacatgaaggcctatggactcaggcttaaaaattacttttaccaggcaaaatattccagaaactcagagattgtcttcctggagctgatcaagggccatttctttctttagaatgtatagcatctgagcaactgaagcctgatgagttcacactttcgtgtataaccaaagccctggccctagcctagaatctcttacagcaaaacaatcatatttactgagcatctacatttagtataacatttatataagatatatcagcagtatcatcatgaacatgctgagccactggagcagctcgtgtggggaatggatagatttagaaacaacaatccatcccataaagccattcatacttttccatatatttgtatcaattcaattactcattgttctccttgatctactgttaattgtactttgtggtaaaccacctcccctctcactacattggcttaagttatcctccaccttgcacatctggaaagagccagagctccctaacaggacttctccctcttgcccctcccatattccaatttccatagactacccagagtgatccttttaaaacataaatcagtccaggcacagtggctcacgcctgtaatcccagcactttgggaggctgaggcgggtggatcacgaggtcaggagatcgagaccatcctggctaacacggtgaaaccctgtctctactaaaaatacaaaaaattacccgggcatggtggcacatgcctctaatcccagctactccagaggctgaggtgggagaatcgcttgaactcaggaggagaaggttgcagtgagccgagatcacgccatcacactccagcctggcgacagggcaagactccgtctcaaaaaacaaacaaaaacataaatcagataacatcacagctctgctcaaaaccccatgatggctacccatttcacagtgtattagctatattttcttattttctgcattgttgatgctatggaatttgggaccttgccatttagagttaactgattcttagagattgcaaatgactcactctgaaccatgccttttatttgcatactaacaaatccagagtaccctaatgtgaatcatctcctctgtctggctcttacactacaggagacaattttttttttttttttttttttttgctctaatgactccagggccaggtactaggcagacagggacagctcctagaccccaaagtctaccaactttattcaaaccagcaaatcctcttctggttacccagccctgcctttcttttcctgtggaaaacaataaaggatctggcctctgctttctcctctgcttctgcttcttataccaccctggtgcttctcacatagccctgcaggatgtgttttgcctactgtttctaaaactccgtgagttgaaagttcttccttcctggcaatcatttgcatgtccgagtttcttatcagaccatactgcaaaaaaccccaggtacatttttgaacacacaggaacatattacaacctctctacgctggcataaaagactacacaatttgtttccatctatctctccaacttccatgcacattcagttccagccgcactaggcttcttggtgttccacaaacacccaggatgctctgtcagttccattgtcctgtgtgttttctctgagtgataacactgtttcctgagatctccacttgatgagtctttaattcctccaagtccatgctaaaacatcactttttttttttcttttgagacgaagtcttgctctgtcgcccaggctggagagcagtggcgtgatctcggctcactgcaacctctgcctcccgggttcaaatgattctcctgcctcagcctccctagtagctgggactacaggggcccaccaccacggccagctaattttttgtatttttagtagagacggggtttcaccatgttagccaggatggtctcgatctcccgacctcatgatctgcctgcctcagcctcccaaagtgctgggattacaggcatgagccaccacgcccggcctaactgtcctattagacctgtcccaaccactctgtattgcacaactggctttatcccactctcactgattcttaatctgctctagtttgtcttatctccgcaacactcctaaccttctatattgtttaggagttttggattattattattttgtgtgtgtgtgtgtgtgtgtgtgtgtgtggtatgtatgtgtctccattgtgactttttgtttttttgtttagaaacagggtttcgctagatagcccaggctggtctcaaactcctggtctcaagcgatcctcctgtttcagtgtcctgagtagctaggactacaggaacaaacccaccaggcccagctctgtatctccactgtttagagcagagcctatcacaagatagtcaagtacttgttgagttaattaattaaaagttagtaaatatataaaaatatattttcaaatggttatgaatgtcctaaagaaaaatagagcagagtaatattggggtgagggactactttaaaatttttattattgttattattttttaaacaaacaggttctctcactctgttgcccgggctggaatgcagtggcacaatcatggctcactgcagcctaaaccgccgtggctcaagtgatcctcctccctcagcctcccgagtagccaggactataggtacccaccaccacgcctggctaatttttaaatttttcacagagacggggtctcactatgttgcccaggctggtcttgaactcctgggctcaagtgttcctcctacctcggcttctccaagtgttgggattacaggaccccacacctggccggaggagctactttagattaagagatccgcacttgagcccaggagttttgagaggagctgggcaacacagtgagaccccatctctacaaaaaataaaaaaaaaattagttgggtgtgttggtgtgggcttgtgatcccagttactcaggaggctgaggtgagaggatcacatgagcctgggaggtggaggctgcagtgagctatgaccctgctacagtactgcagcctgggttacagaggaagaccccatctcaaaagaaaaaaaaaagagtaagagatctggagaggcctctatgagaagggaatggttgatacaagctgagactcattacctggaccacatgtctacaatccaggtggcactggctcaacactgtatcttttacatcatcttgcaaagtgccttccctcagcttctctaagaagtatttgtagagtgaatgttgagtggattttataataatgctgtgaaatccccatggtctcctggcaccactgtaggactgttactgtaggactgcggggtcacccctggctgttaaggccatttccctttctcttctctcagcaaccagcctatggcttcaggggaaacttccagttcaagactgaaagtcatggttttggccctgagatgtatttctgctcctgactccatgagaacaagacagattctacagggaatgaaaggagaagctacaaggaatgaaaggagaaggaatgaaaggaatgaagggagaaggaatgaaaggagaagctgactggagcaaacactagttatgaaaggattccctatgaagtgagacttgagatgaagaggaagcagcagattccagatgaattttagggttggaacccatatattaccttcataaccagagagcctggtattcttgattcttccactatagaccactgatgtggtttgagaagagagtacagaatgacaccactttcaacaatacccagaggcataaattgctccaaagctttttatcaggcttgaccgaacacggtggctcacacctgtagtcccagcactttgggaggccaaggcgggtggatcacatgaggtcaggagttcgagaccagcctggccaacatggtgaaaccctgtctctactaaaaactacaaaaatgtaatcccagctacttgggatgaggcaggagaatagcttgaacctaggaggcagaggttgcagtgagccgagatcacgccattgcactccagcctgggtgacagagcaaaactccgtctcaaaaaaaaaaaaaaaaaaaatcaggctgtttgggttcccaaactgtttgatatttgttctacctcaggttggcgtacctccacatgtttctttccaggctctctgcttgtcccctcaggcagtatctctggatctgggttctaaagctgggagtgggaacaatggcccacttctgacatcctgctttgagggttgagtgctcagtggtagcgggtggccagtggtctcatgtcttttcagctgccctgtcatggtacactactacagactttcagtggggcaagtgtgatgaatccccagtgctcagcatcatgatgcccaaggaagggccttcatctcaccaacactggatgggtggaggaagggagctcctgcctctggggctgcactcactagggatttagcctcagcaagtttctggtggcaagataagaaatgctgacatcctaccctgctgggaagacagccctctgtatggaagctgagagggagagccctgtgttcttgtctgcaacactgtagagtacagtttccatatcattgaactgggagggctgaaggaaagagatagtcttggttcaaataccacagactctcgcagttcttacagaaggacagattctcttgaataaatattttttcatttgatgtatatccttaggactatctccagagacacgactttttttgttttcatttttgtttttaataattttcaacagttttgttggggaataggcccacagagctccttatgctgtcacgccagaagtctctccttgctttttttgttttaaactttttattttctgacaattttagctgtaaagaagcaaagatattacagagttcctatataacttcatgcagctccacctcatgttaatacttcataagcctatgacatatttgtcaaagctaagaaattaacatggtatactactactactactaactgaactacacactgtatttggatttcaccagtttttttccactaatgtcctccagttgcaggatccagtccaggacaccacatttcagttaatcatctcatcgctttagttttctcccatctgtgacagctgctctgtcttttcttgtttttcatgatctacatacttctggagtactcataatgcaatgtcccttaatttgcatttgtctggtattttttcattattagtctagaattgtgggttaaggggaagaacatcagattggcaaagtgtcctccttgtatcatcatagtaggtgttacgtgatgtcaagatgactaaaatggaccaggcacggtggcttacgccctgtaatcccaggactttgggaggccgaggcgggtggatcacaaggtcaagagatccagaccatcctggccaacatggtgaaaccccgtctctactaaaaatacaaaaattagccgggcgtggtggcgtgcaactgtagtcccagctgctcaagaggctcaggcaggagaatggcttgaacctgggaggcggaggttgcagtgagctgagattgcgccactgcactccagcctgggagacagagcaagactccatctcaaaaaaaaaaaaaaaaaagatgacttaagtgatgctaaccttgatcacttggttaggtacttgtctgccaggtttcccctgtcaagttactgttttcattttccacaattagtcactaaatccagccaactcaaggggaagaccacaaagctccactgtctgaagggggctgttggtatctatgtatactatttgcaattcttctttaagattggtttcttctccttgtttatttatgggtgagccttattaattactggttttaatttctgaaaaatcaagtaagtgctcaccttagcaatacatatattaaaaatcaaatgtaagtgcttctatgtgtgttttgtgaatcccgtcttatacaaataaggtaagggagatactaagatttggaaatagttcgtctccaccaaaactcatgttgaaatttgatttccaagctgggcatggtggtgtgcacctgtagtcccagctacctgggaggctgaggccgaaggatcacttgagcctaggagttcacagacagcctgggaaacatagtgagaccccatatgatatggtttggctgtgtccccacccaaatctcatcttgaattgtaactctcacaactctcatttgtcatgggagggatcggtggggggtgactgaattatggggcagggtctttcctgcgctgttatgatagtgaaggagtctcaccagatctgatagttttaaaaacaggagtttctggctgggtgcggtggctcacacctataatcccagcactttgggaggctgaggtgggcggatcacaaggtcaggagatcaagaccatcctggttaacatgatgaaaccccgtttctactaaaaatacaaaacattagtggggcgtggtggctcacgcctgtagtcccagctactcaggaggctgaggcaggagaatcacttgaacccgggaggcagagtgagccgagatcgcgccactgcactccagcctgagcaacagagtgagactccatcaaaaaaaaaaaaaaaaaaaaaggaaacattcagtaagcttgttctgtattcctacacaaagagtataacagcaatatattccacaagagtaaagcaaaataagtaaagttattctaagtaaactaaattagaaggcttttcatgaactgagcaactgttggaactaagctggcatggggttgttagctgattataatgtgcccagaattggaatattgatccagatttttacattacccatccctcttattttttctgagcagcagtcagagatgttggttcacaggaataagcagggtagcttaaattgcagaaacaaacttaaaaagaactaatgagactagaatttaataacaagtataccatagttcttgaaatataatatttctctctccagtttcccatttttactaaagacaaattagggtaagactgatttgatttgctttattatacttggcctgattatttatataaagtgcagcaagaataattattttccacataggcatttttttttttttttttttgagatggagtctcgctctgttgcccaggctggagtgcagtggcgcgttctcagctcactgcaagctccgtctcccgggttcacgccattctcctgcctcagcctcccgagtagctggggctataggcacccgccaccacgcccagctaatttttttgtatttttagtagagacggggtttcaccatgttggccaggctggtctcgaattcctgacctcaggtgatctgccctccttggccttccagagtgttgggattacaggcgtgagccaccacacctggcctatccacttttaattaagctaacttttaaccatagtgctctttaaaaaagaaatcctttcaaatctcttattacccaactttagccatgccaagaagccaatatttctaacttctgaactttaccaaaggttatctcctacgtgcatagagaaaggaaaatttaagacagtctgcggaggagaagagactagacaaggtcacgcagatattaaaccagaaatgacttacttcctaggtggggtatcaaacccaaactgccactgtgaaagtgcagaaaccttagttactgagctacagtgtgggacggtgcctacttcctttcacagaagcctagagtagttaattttgagcttgcaaaggcttttaactattttatatgatttttagagctgactatgacatgaaccctaaaattccttttccctagtaggtggagaccaagagaaggtactgccacatggttaaaaggtcaggctcccaaggacataaaacaaggggagacttcatcctgtttgtttgtttcagggacctgcagctgtttgttactgaccagtttgctgggtcatgttgaaaagtgggctcacaggtgttctaagcccatgtttcatcctacagaaaaacaaattcacagcacaaaatacaccagtttgactagcttagaattctttttcatattaatcaaaactttacagaggagatacacactgatttattatttttattattgttattatttttaccattcattcaaccgtttgcacagagagggagaagtcagaaatctgactggtaacaaattcttacctttttgctggcatgccaggcttctgtgttccctttctctgagtggtcccagtgatctggcttgtggcaccatcgccctgggggccaagcctcattgtaaaggaaaactactttttttcattctgaccagagcaaaacacatgtgatgaaacatacacattagccactctgcttagcacccaatattaaactggcaaggcttaaatttgcccccagataggccctgtcatctttaatccaacctctgacttggagtttcaacatgtggtctctgggcaagatggtcgccctgagtaatagagtaatagaaaagataagaaaggggccgggcgcagtggctcacgcctgtaatcccagcacttcaggaggccgaggcgggcagatcacaaggtcaggagatcgagaccatcctggctaagatggtgaaaccccgtctctactaaaaatacaaaaaattagccgggcatggttgcaagcgcctgtagtcccagctactcgggaggctgaggcaggagaatggcctgaacccgggaggtggagcttgcagtgagcagagatagcgccactgcactccagcctgggcgacagagcgagactccgtctcaaaaaaaaaaaaaaaattatatatggaaatgctttcgcaggcaatactttcccaggaaatattttccacaagcaatactttcccagggaaggcaaaatgatcagggaggccagagaaagacccacccattgcagtgacactgaaaagttcaggcggctacggctgctgtcgtgaagggatttttttccagcagtcccgtcagctctcaagtttccccttttgggggaggaaaaagctccccatgtcccacgatcctgtacacgcctaaccctgtcgcccggagccatcagcaaagagtgcaaggcagattaatccaaagacaatagcagttaacatcccacggtgccaaacctcttcttagccaagagggactttactgagaggggtctctaaccccctaaatcttagaagggactctaatcctcctaagttgggcctctaacccaaggtcagtcaagcgtccttgccttttattaagaggggcctctaatccactctgccttaggagagactctaactcccctaacttgagcgtctatcccaatcccattctttacctgggtaccccaccacttacccaaagtcatccaatcagtgctgcagtctatttcctttgagtcaggggggtctcctcagcattgtcccttttgtggtttgcgagaaaagtgttacccgaccccaccacttacccaaagttagcctttgggtcacgggttcctgcagtatagtctcttctgtagtggccaggaatgtgttacaggaaaggggtcccaatccatatcccaagagagggttcttggatctcgcacaagaaataattcagggcgagtccacagtgcaagtgaaagcaagtttattaagaaagtaaaggaataaagaatggctactccatagacagagcagccccaagggttgctgggtgcccatgtttatggttatttcttagtgacttgctaaacaaggggtggattgttcatgcctccccttttcagaccacatagggtaactccctgacattgccatggcatttgtaaactgtcgtggcactgatgggagtgtagcagtgaggaagaccagaggtcactcttgtcaccattttggttttggtggttttggccagctcctttactgcaacctgttttatcagcaaggtctttatgatccgtattttgtgctgacctcctatctcatcctgtgactcagaatgccttaactgtctgggaatgcagcctagtaggttttagcttcattttacccagctcctatttaagatagagttgctctggttcatatgcctctgaaaaaaccatttaaatttaattataagagtctggccagagggggtggctcacgtctgtaatcctagcactttgggaggccgaggtgggtggatcacctgaggtcgggagtttgagaccagcctgaacaacatggaagaaccctgtctctactaaaaatataaaattagccaggcgtggtggcgcacacctgtaatcccagctactcaggaggctgaggcaggagaatcgcttgaacccgggaggcggaggttgcagtgagtggagactgtgccactgctctccagcctgggcaacaagagtgaaactccatctcaaaaaaaaaaaaaaaaaaaaaaaatttaagagtcacaaatatgtgaaaaagagaatgatgtctttatcaattttcaaaaattactattgccagtgatgaataacagtgttccttgcacactaatttagccaaaaatatttctccaaaagtaccgcatcgtgtaggaaattgactccatctccattccttgactattttcaatctcaaaattaaatctcttggagagtactttctgcacacctttctatttccttaaccatatatatcgtcaaaccattgaaagctggactttattctctcactttcatagtcatgaaaagaaaaaaaaaaagttactgatggggactcctaagacttcgcataatataatctttgcatagtctaggattgttaaaattcctaacaagactttataaactctcctgtctgcaaccagttaatgctgggttgggccagggttcccctctttcccgtcacttatccatctacgctcattcttttcatagcctcacccaatatcatgacttgaagtaacagtttacagtaataactcccaaatttatatatccacgctcgaaccctctgccaatgttgaatcataggttgagtatatggcactacgctttgtggtcttactgacgtttcaaactgatcatgcttgaaatgggagtactgggcttcccggcaagcctgctccactagcagcctccccacctcagggtacgggaagtccacacgtggcgaacgcgaagcctattacatcacccggaagtccctgcatcctacgaaggctgggcccggccaaaggaggcccaatagagggcggtctgtcctttcccagcaggctgggcacactgtcaggcgtcctcctttgggtggctattttaactgctcatttatccttttcttctatgaaaagatccagaaaagaggcaaagcaagcgagaagtcgcgggcccagcccacagcagggtaagcacctttgttcggggtctgaatcggggcgaatatccccgcctcctgacctcgattttcctgagctagaagggacctttcgaccctccgacttgtgcctatactaaggcggtggccctaagacgacgcgggggttctggtgcgcacttacgtgcagtcggatgcgctgggtgagttcccacacccggtagatgtaagggaaaaactgcattacccagaaggcactgccccttgcgtcggccgcggactctgggccattgacgacccaggacaggagagttttctgcgggccagggcggcggaggcgggacttccgcttcttcgtgtgacgtcatctccgtgggccggtttggccctgaaacagtgtggggcctagagcgctgggtgggcgcgttctgcggcctgagcagggacgggtagtgaagcggttacgccccttcttcgcgtcttggcgggagcctgacgccccgcttctcccctaacgaggtgtcccaccggcgcccgccgaggcctaggcctccgcagccgccctccgtctcctcagccccgacgctgcgccttgggccttgtgcgcatttttttcgggggaaaactgaggctcggagtgcgaaagtcagccgaggtcgccccgcccaggacagagaagggctgtggtcggctgatccgcggcattcccgggatggcggcggcgtggatggctccggcgcaggtgagtggacgaggtttcggccttgctgctgctgtgctatttctagaggcctcgtgggcaggctggaagccaagacagccacaggatttttctttgtcgccatcgtttatttaagagaaatggccgtggcttgtcatttcctttatccgcagtcctgcaacagtgttggcctctgataggtgttcagtccgtggttgaaggagtgatgcttccttctagggatctcatcacacttcccctaaatccaaccttctctgttgcctgccagcccgtaccccatccacctggccaaccacccctgaccttgtctgtttgcatttttccctggtcctttgctcttcagagccaccaacctgaccgtgcagtcctcttccattttccaggctttctccttgcacttccttttacttcgaacactgcccctgtaactttgcagggcctccctttcacatccttttggcatctgtccaggtgtcacctatttggaggtgccttttttggcaattccggctaaagtggcaccttacacccttgcccagagtctggtatttttgtgtagataatctgatggtattaaagaagcttgtggatttgagtttgtcaaggatgtaatgggaacaaagaaaaataattgcaaagaatgatattaactgtcattgagtccttgctgtgggctgatcggtgagtattatttaaccctcagttcgtttaaccctgaaatttttttttttttttttttttttttttgagacggagtcttgttctgtcgcccaggctggagtgcagtggcgtgacctcggctcactgcaacctccgccttttgggttcaagcgattctcctgcctcagcctcctgagtagctgggactacaggtgtgcgccaccacgcctggctaatttttgtatttttagtagagacggggttttaccgtgttggccacgctggtcttgaactcctgacctcaggtgatccacccatctgggtctcccaaagtgctgggattactctttagaattaggttctgttgtcatcattgttttacacaagagcaatttgagggtcacatacgtccaattacctgccttacatcactgtagctcttaagtttcttaagtcagaaactaacaactggtgtgtctaacatcatagcctgtgtttttaccctcttctttacccgcagtggttagggaggcctgggggtgagacctaaagtaacctttgcaagatgaggcctccttctagccagtgatcttgggcatgaggagtcatggcctttcatactggtggaactgtgtagacttaaaaaatggtatattggttgtttaaggagttctcaggggacctgtgtggcttccacggtggttttatatgtggttccccttactcccttacctgctgacatattctgagagggcacgtttgtatggttatgttgctgaatgtaccctcctactcagccaggatagatgtaatctccagatgggcccatattgtcttggctacaacctgctgtgccctctatgactcttgttgcttgctcatggaatcttctggcctcagggatgcctgctagtaggacttaggtagaaaaggaagcgatggctcattgtgaattctccctggaagcaggtccaggccctaacacctgatcaggtgtcaccacgtcaggtgattctttggtgaggtggatgatgatgactacacttctctgcccttgtccatgggagtggctgaaatgtatatgtggatttgaaatgcttcattctcattaactgcattaactttgctaatagagaaatgtcaggttacataatcagaccagagggccctgggcttaaatcctgcctctgttgataagacctgtgactttgggctgggcttggtggctcacacctgtaaaccctgcactttgggaggctgaggtaggtggactgcttgagcccaggagttcaagaccagcctgggcaacatgggaaaaccctgtctctacaaaaagtacaaaaaattagaccggcatggcatcatgtgcctgtagtcccagctgtgcaggaggctgaggtgggaggatcactagatcacaggaggtcagggttgcagtgagccgacattgtgccactgcattccagcctgggtgacagagtgagaccatctaaaaaaaaaaaaaagagagagacatgaacacatgagactttgggtagactggtagagcggagggtaggactgaggcccaggtctcaggtccctgagtgtgacatagagatgatgatggtaaattcagatgctgtggcctttgcctcagtgtttgtttgtttttttttttttttacaaacagtttttctttctttctttgttttgatggagtctagctctgttgccaggctggagttcagtggtgcgatctcggctcactgcaaccatcgcctccgacgttcaagcgattctcctgcttcagcctcccgagtagctaggactacaggcacacactaccacacccagctaatttttgtatttttagtagagatggggtttcaccttgctagccaggatggtctcaatttcctgacctcatgatctgctcacctcagcctccgaaactgctgggattacaggcatgagtcaccgtgcccagcctacaaacagtttttctttagttcttttgactattcttttttttttttttttttttttttgagacagaggctcgctctgttctggagtacagtgacacagtcttggcttactgcaacctctgcctcccaggttcaagcgattctcctgcctcagcctccctagtagctgggattgcaggcttgtgccaccacacctggctaatttttgtatttttagtagagatggggtctcaccatgttggccaggcttgtctcgaattcctgacctcaggtaattcatgtgcctcagcctcccagagtgctgggattacaggcatgaaccaccgtgcccagccttgactattcttgatgaagtgggaaacacggttatattgacctggaaatggaggctcggcgaaatgaaatgaggtccccaaggtcacatagcaggcacacgttgatttcaggaatttggttttaaacctcaggagtctggctcctgagctggggagtttcagtcactttaccatggcatgtaaacctgtcagcatgaggcaggcacacagggaggattggtaagactcagatactgttcctgttattgttgctggtggtgatgtttttattattattatttcccattcctctaatatgtcagagcacttactgtctgtgcctctcagtccacttgggattgtcctaaccttatttctgtgttaagttcaagtggcttcctgcctaggaggctttatttatttatttatttatttattttttatttatttatttatttttttttgagacagagtcttgctctgttgccaggctggagtgcagtggcacgatctcagctcactgcaatctccgcctcccaggttcaagcagttctcctgcctcagccgcttctgtctcctcttcactgctgtaatccatgcaaggcagtgtccacattccccttgatcctagcacagatcttggccctttggaggtgcttggtgatttggcctttgattctctgtgcatcttttgcagtgctggagtgacaggttctaatcctattccacagttgcaaaggaaacattactggttctttttgacttttcaggagtctgtgaccttcgaggatgtggctgtgacatttacccaggaggagtgggggcagttggacgtgacccagagggccttgtacgtggaggtgatgctggagacctgtgggcttctggtcgcactgggtaaggcctgtcctctcctctccaaaatcaggggcaccagaaagcagcttcattctagccttcatcctggctccaggcctggctagtggaataggtcttgggagccagccctcctgtttcccaaagctttactctatttttttttttttttttttggagacagagtttcgctcttgttgcccaggctggagtgaaatggcgtgaccttggctcaccacaacctccgtctccccgattcaagtgattctcctgcctcagcctccagagtagctgggattacaggcatgtgctcccatgcccagctaattttgtatttttagtagagaaggggtttctccatgttggtcaggctgttctcaaactcccgacctcaagtgatccacccacctcagcctctcaaagtgctgggattacaggcatgagctaccacgcccagcctcatttttttgactcaccttattcttcctgatctctttgtgtcttacttagaaagggttggctacgaaatatagtttgcttttggtcacagccaaaggagagggatgtgttaccaggaaatgggatgttttgtagaacccaaaggcaggatttgcagccaggcccccctgtggcactaatactggttgtctggtgctggcttccctttatgggtctgctcctgtcactgtctttttataatggctttttctggctcagctattgtgtggaacgaagtgaccgtctagtcttgttctctgaggctcacacattccttggcactactacttcctgcatatttttgttgtctctctgttgatactcttctcacttaattctcccagcatccccatcgtcagtgagtaaggataatagggccattgcaatgaacacctcagaaacttaattaattcagtttaagagataaaccttcattgtgagatgctgttcgttgcattttttttcttggtaaaggttctttcttttgtgatgtgttgattttgatgtttgtgcaaacgtctatatgtggccaaatcgctatttggagttccctcccagttttttatttttcagtggttcatgaaatgtcgaagcgtggagtcaccacgtctacccctcactctgctgccctgttcccttaggattgagttcttccactcatgtctcccattctttatggcctccttgttttgagactcctggcaccacacgggggtgttcttcatttcctctgagcacagcacttgggagaccaaggtctgatgcctcagagtccaattccagctctactttttgtcagctgtgtgttcctgggcaaagtactgaactcctctgtgccttaattttctttttagaattttttatttctttatacccatgccagtgcagaaaagtgcctcaattttctcatgggtaaaatgggacaatatgtgccaaaaaaggcatacgtttgtttcattgtactttgctttactgcaccttgcagttactgtatttttagaagttgaatgtttgtggcaaccctgaattgagcaagtctgtcccgcaccatttttccaacagcatgtgctcactttttgtctgtgtcacgttttggtaattcttgcagtatttcaaatatttttattaatattatatctactgtggtggtctgcgatcagtggtgtttgatgttactattgtaattgctatggggcaccatgaactgcaccatgtaagacagctttatcaataaatgttatgtgtgttctgactgctccacttactggccattccctctctgtctctctccttgggcttccatattctctgagatacaacaataatgcagtcaagtcaattaataacactaaaatggaagccagatgcctctaatcccagctactccggaggctgagatgggaggattgcttcaggccaggagttcgagactaggcttggcatcataataagactccatctttttttactttttgaataagctataactcatatgctgtgttgtgcaaaaatcctaagaagtccaggccaggagtggtggctcacacctgtaatcccagcactttgggaggctgaggcgggtggatctcctgaggtcaggagtttgagaccagcctggccaacatggcgaaaccccgtctctactaaaaatacaaaacaattagccaggcgtggcggtacacacctgtaatcccagctactcgggaggctgaggcaggcgaatcgcttgaactcaggaggcagaggttgcagtgagccgagatcgtgccactgcactccagtctgggcgaagaaggagactctgtctcaaaaaaaaaaaaaaaaaaaagtccactcactgaatttttgcttatgtataaacccaagtaactaccacctacatcaatacataggctatctccagctcctcatcagggttttatgccctcgatagcttctttgattctattagctcatatttagacttcatcagcacagattggttggctgttgttgaactgcacagtgtgctctctgacatatctgtcttcttttgatcatcatgtctgtgttattcttttgaggtgtttatatacagtcggagttggttcattctcaatatgttgtagtttctcattgtatgtgaaactgccatccatttgtccattaccctgctgatggatgttcctgttgttttcaggttttggatatgttgctgagagtattattgttcatattttctggtggatgtaaatactgatttctgaattgtgtgttaacagtaaattctgttagaatatactcgtgtgtacatatcaggtcatggagtaggttgtatattcagctttctttttttctttattattttttgtagaaatggagtctcactatgttgcccaggctcatcttgaactcctggcctgcactgatcttccctccttggcctcctaaagtgctgggattataggcatgagccacactgtgtgggtgtgttcagctttaaaagaaactgcccagcagttctgcagaatgtaccatttcactttctgaccatggacatgtgaaagtttccattgctccacatcttcataatcacttgataacatcattcccctttgggaggtctaggcgggcggatcacttgaggtcaggagttatcagcctggccatcatggtgaaaccccatttctactaaaaatttaaaaattagctaggtgtggtggcaggtgcctatcatctgagctactcaggaggctgaggtaggagaattgcttgaacctgggaggtggaggttgcagtgagccaagatcacaccactgtactccagactggacgacagagcgagaccccatctcaaaaaaacaaacaaacaaaaaaaaccatcatttcattttactgtttgagtccctgtggtaggtttctctatatcacagcacagaaaccattgtaaggtcactcctttcattcctaattttcaaatacaacagtgaccataatgataactgatgatggcccacaatttaccgatctcttatgtagtgtctagcactgtgccaagtgctttatagaaattttccccttttttaagagacagggtcttcctctgtcgcccaggctggagcgcagtggcaccatcatagctcactgtagcctcaaactcctgggctcaagcagttctcctacagagtagctggaactacaggctcatgctacaacgtccggctaatttattaatttttttgtagagatgggatattgctatattgcccaggctactcttgaactctgggcctcaagcaattcttctgccttagtctcccaaatgtaacgggattacaggcatgagccaccgtgcccagccaagaattttcctatttaaccctcatcacagcctatgaaacagaatctgagagtttctgtttttcagatgaggaagtggagactaggatcaactaaatcatttctctggcatcagctgacttggtacaggcaagatttgaactgagatgttctgactccagagctacactcttaacctcccttcaatatgaactcacgattcagcacagagttttcatattttgtgcttgagcattgggccgtcttagattctctttctctgttctcactgggctttggttctctttttactctgatcttcacttttatgttggcttcatcagttatctcatagcccatcctttttactcttacatactctccaaggctaatccacacattctttttatttattattattactttttttttttttttaagagatggatctggctatgttgcccaggctggtctcgaactcctgggctcagcttcccgagtagccaggattacaggcagtacctttcagattgtgtctttttctagtattttcaggttattgtttctcagggttgtattgaatttctggatcagtttttagagaattgataattttatattatcaatttcttcattcagttagatctttattgtcttgaaataaagttttattattttctttttcaagatccagttgtttgttagccttttcgcctacctttcaccttgacagtggattctatatgtctaccaggattctgttcaccctctgtcctaggagctctgtcctaagagtagctgtggccatcactagctgtccctcaggcagaatcttgagcatcagcttcgtctccgccccttcctgtctctgaatcctgatcaaccttaacttcttatggggctgcctcctctcactgcagtcctctggattcgctgaagactctgtgtctttgtatattctatgtcctaaggctaatatgtccttctaactttaagctcatgaagcatcctctctgggaagcctccttgacctcttcctgtccctgccccttctaggctacattaagtgccccttccctggcctcttgtagctccttgacatgttcttgagcaagcttatgatagagtgtcatcattatgatgtccacctagtctcatcttgactgtgagtggggatctctattccagaccatctgtactctgcttgagcttctccctctgggtttctctttaaaaatttcaagagttggccaggcacggtgggtcacgcctgtaatcccagcactttggaggcagaggtgggcggattacttgagcccaggagttcgagaccagcttgggcaacatggtgaaaccccatctctattttaaaaatacaaaaaatttagccaggcggggtggctcacacctgtaattctagcattttggaaggccgaggcaggcagatcacctgagttcaggggttctagaccagtctggccaacatggtgagacctcatctgtaaaaatacaaaaaaattagcccagcatggtggcgcacacctgtaatcccagccacttgggaggctgattcaggagaattgcttgaacccaggaggcagaagttgcagtgagctgagatcatgccactgcactccagcctaggcaacagagtgaaattccatctaaaaaaaaataaacaaaaaaaagccaagcgtggtagcatatgcctgtagtccagctaccttggaagctgaggtgggcagatcccgggtgatccgcctcagcctcccaaaccaaagtgctgggattacaggcatgagccaccatgcctggcctttttttgagatgggtttccctctgtcacctaggctggagtgcggtggctcagtcttgactcactgcagcctccacctcccaggttcaagcgattctcctgtctcagcctccccagtcgctgggattatagccgcccgccaccatgcctggctaatttttgtatttttagtagatatggggtttcaccatgttggccaggctggtctcaaactcctgacctcaagtgatccgcctgccttggcctcccaaagtgctgggattacagggatgagccactgtacccagcccatcaaatcatagctattttcaaatcatcactattttcatcttattgttctcaccaaaaaggtggtttcatttcttctgtactatcttaataagttcttttgtgtattgtgttcccttcaggtgacagcacaaaacctgagaccgtagagcctatcccttctcatctggccttgcctgaggaagtctcactccaggaacagctggcacagggagtcccaagatactcctatttggggcaggccatggatcaagatgggccatctgaaatgcaggaatactttttgagaccagggacagacccacagagtgagaaactccatgggaaaatgagccttgaacacgaaggtttggcgacagctgatggtatttgttcaatgatgatacagaaccaagtctcaccagaagatgctctctatggatttgactcatatggaccagttacagattccttgattcatgaaggggaaaattcctataaattcgaggaaatgtttaatgagaattgcttccttgttcagcatgagcagattctccctcgtgtgaagccctatgattgcccagaatgtgggaaagccttcggcaagagcaaacacctccttcagcatcacatcatccatactggggagaagccctataaatgcctggagtgtgggaaagacttcaaccgcaggtcacacctcacacggcaccagcggactcacaatggagataagccctttgtgtgcagtgaatgtggaaggaccttcaatcgcgggtcgcaccttacacggcaccagcgggttcacagtggagagaagccttttgtgtgcaatgaatgtggaaaggcctttacctaccgctccaattttgtcttgcataacaagagccacaatgagaagaaacccttcgcatgcagcgaatgtggaaaaggcttttatgagagtacagccctcattcaacacttcattatccatactggggagaggccctttaagtgccttgagtgtgggaaggccttcaactgcaggtcacacctcaagcagcatgagcggattcacactggtgagaagccctttgtgtgcagtcaatgtggaaaggccttcactcactattccacctatgtcctgcatgaaagagcccacactggagaaaagccttttgagtgcaaagaatgtgggaaagcctttagcattcgaaaagacctcattcgacacttcaacatccacactggagagaagccctatgagtgtttacagtgtggaaaggcttttacccgcatgtcagggctcacaaggcaccagtggattcatactggagagaagccgtatgtatgcatccaatgtgggaaagccttttgtcggaccacaaacctgattcgacactttagcatccacactggagagaagccctatgaatgcgtggagtgcgggaaggccttcaaccgcaggtcacccctcacaaggcaccagcggattcacactgcagagaagtcccacgaacccatccagagtgggaacgtttcttgtgagagcacagatctcattcaacactccatcatccacactgagagtagcccagtgagtgcagtgaatatggaaacgccttcaattgccgctcattcctcctcactcgacatcaacggattcatagtggaagaaaccctaccattgtaacagatgtggaaagactttttacgtacacttcagtcaacatccaagaattcctattagcgaaatagttttttaatataaccactgaagaaaatctgtggtgagaggaaacatcttaccatctggtcattcatactgaagagaaactccataagtatcatctctgtgggaaaacctgttttagatcatcatttgtcatctaaacaattatgttagaaattgacacagccaagagtcttattctacatctgataattcacccatgaaagagacccagtggttactgtgcacttaggaaaaccttcagccacatctttcttattagtttacagtgaaatgttatctcagggacattcaaacaaaggaggaggagtcatagggaagagaaagaaatggaagcacagcttctttcagacttccctgacaagcccatggcaatttgtcatcccctccttattttatttgggagagggaaatgtttcagaaacaaaagggcctcatcccctttattttccctgtgtatacattcactgctgtccagtgctgtagacaaacggtttgtttgaaaacattttgtgaaagcctgctttgttccacagcattgtctccactcttgaggagcagaagcatatatctttatgagaaagatggaggcttgagttatgaaatacttttacatttaaggagataaaggatgtacatatgaatgggcacattttactgcacacttcagacgctttgacttttttaaaaaaattgtttctccgtgtgtctttaaccacccagtaccatacttttttcttgatctggatctacttgtcaatttcttctttatttttctgtaggatggagatgatattgtagctgtttgtacataatgtaatccagggagtcctaattcttccctctgattgtggtttctcagcttttttactgctctttagagagagtaaatagttcaaaattcacctcaacaattttctagaggtcaatttggaaccaaaaatgaaataagacatgtagctaaagtaagttaaaagattatgataaactcagaaaataaacacagagaaggaatctcatttttcagtcttacagaagattgtgtgaaggctgactatacataaagtgactggaattttaacaggtgaacctgcatatgtatatgcaggtagttgtcaccatggattgagtccagtcgtagtaattaatatgtttaatcagaatattttggaatttctcttttggtattctttttgtttcttttattgtttttaattgacaatgtttatggggtttggtgtgatatttcaatacatgtgtgctaagagtaatgatcaaatcagggtaattagcatatccatctcaatcatttatcatttctttgtgtttagaaacattcacagtctgcttttctagctatttgaaaatataaaatgtattattgccaattgtactcattctgcagtgccacagaacactacaacttattcaaatggaatcttacttgctgtaattttgtatttgttaaccaatctctatctgcctctctgctgtccttcccagcctctggttaccaccattctcaaccttttatgcttgcatatgagtagaaacatggagtatttctctttctgtgtctagcttatttcacttaatgtctttcaagctcattcatgttgctgtgaatgacaggtttatttttcatggctgagtagtattccattgtgtatatatgccatgttttctttcttcattcatctgataatggacacttagactgatttcttagctattatgaatagtgcttcaataaacataggagtgtagatctctctttgacgtatagatatatttgtttttgcatatatgcccagtagtggtatagatcattaccagtggatcatatggtagttgtatttttaacttttgtttatttttcattttttaaaatggggtcttgctgtgttattcaggctggtctcagactcctgggctcaagcagtcctgcacctcagcctcctgagtagctgggactacaggcacacaccaccgtgcctggctatagttttagatttttgaggaacattcatactgttttccatatggctatactaattagcattcctaccagccatatataagagttcccccttttccatgttctcagcagcattttttattttttatctttggtaatagccatcctaactgaggtgaaattatatctcattgtggttttgatttgcatttccctgattagtgatgttgagcattttttcatatacttggccatttgtatgtctccttttgagggatgtctattcaccttatttacccattttaaaatcagattttttatttttattttttttgctattgagttccttttatattctggatattaatccctttcagatgaatagtttgcaaatattttatcccactctactagttgtctcttcattctgttgtttcctttgctgtgcagaagttttttagtttaatataatccctttgtttatttgtgcttttgttaccttgattttcaggtattcataaaatccttgcccagaccaatatccagaagcatttcccctatgttttcttctgtagtttcatagtttttgctcttacatttaagctttcaaaccattttgagttgattatcctgagagcatagattcaaattgccctaaaaatacattcccaatttttgtttttgctttttaattattttttagagacatagtctcaccacattgcccagcttggtcctgaactcctggactcaagtgagccacaactcagccttctgagtagctaagattacaggtatgagccagcatacttggtgttttgagttgatttttgtgtatggtgagagatgagtctactttcattcttctgcatatgaatatccagtgtcccagcaccatttattgaagagactgtccttttcccagtgaatgttctttgtgcctttgttagaaatcagttggctgtaaatgggatttattcctgggctctctgttttgttccattggtttgtgtggtttttaaaaaatacctgaaccatgctgttttggttaccatcactttgtagtatatttcaaggtcaggtagtgtgatgactcccattttgttctttttgcttaggattgctttggatattcagtatcttctgtgatatcatgaattttaggattactatttctatttctgtgaaaaatgtcattggtattttgttaagagtgcattgaatctgtagatcacttgaggtagtatgttcattttttttcataagctatctcttacaggaaagtatgttcatttttatagtaaccattctaatccatgaccatgggatgtttttccttttttatgtgtgtcctctttgatttacttcatcagtgttatatagttttccatgtattcttattttatttttgttgaagtattgtaaatgggatggctttcttgatttctttttcagctaattcattgttggtgtatagaaatgctgctgatttttgcatgttgattttatatcctgcaagttcagtgaatttatcagtcctaagatttttttggtgccacttttggagtttagggttttctatatatttgatcctgtcatgtgcatacagggataatttgacttcatgcttcctgatctgcatgccctttatttctttgtcttgcctgattactctgtctcagaccttttgtactttgttaaaaggtgtgaaagtgggcatacttgttttgtttcagattatagagagaaagctttcagcactttcccattatgcatgatgttagctgtgggtatgttacttattacctttattatgttgaggtacgttctttctattattattataattttttttaattttttttttgagatggagtctcgctctgtcgcccagctggagtgcagtggcatgatctcagctcactgcaagctccgccttctgggttcacaccattctcctgcctcagcctcccaagtagctggaactacaggtgcccaccaccatgcctggctaattttttgtatttttagtagagatgggttttcaccatgttagccaggatgatcttgatctcctgacctcgtgatccgcccgcctcggcctcccaaagtgctgggattacaggtgtaagccaccgcggccggcccattctttctattattatgtgtaatttgttaagagttttcatcatgaggggatattgaatgttaccagaggctttttctccacctatggagataatcacattttttgttcttcattctgttgatttatcatgtttattgttttgtgtatgttgaacccattcttgcatccctagaatgaattccacttggtcatggtaaacaatctttttgatgtacttttggatttggttggctagtattttgttgaggagttttgcatttatgttcatcaggaatattggcctgtagttttcttttgcatgtgtgtgtccttatctggtgcttgtgtcatggtaatgctggcttgtggagtgagtttagaataattccctcctcttcattattctgggaaagtttgagaagaattcatatttaattcccctaaaatgtttggtagaattcagcagtgaagccatgagatcatggactttcctttgatgggtgactttttattactgcttaaatcttgttactcagaattggtcaattgaaattttctgtttcttctaggttcaatcctgatgggttgtatgtgtctaggaatttattttctgtaggttttccaactttttggtttgtagttgttcataatagtctctaatgactctgtatttttgtggtatcagttgcagtgtcatttttgtatgtgtttgattttgagtcttttctcttggttagtctaatggtttcttttcaaaaaatgaacttttcattttgttgatcctttgaatttttttttaagtctcagttttatttattactcttctgatctttattaattctttccttgtaattttgggtctgatgtgttcttttctagttccttgagaagcattgttagatttttcttttttctttttttctttttttaagagacagggtcttactgtgttacgtaggctggagtgtaatggtacaatcaactcaaactcctgggctcaagtgatcctcacacctcagttttgaattcttgggctcaagcagttctcccacctctgcctccagaatagctaggactactggtatgcgctatcatgaccagctaatcttttttttttttttttttttttttttttttttttttttagagataaggtcttgctatatatatggcccaggctggtcttgacccagcatcaagtcgtcctcctgccttgcgctcccaaagcactgggattacaggtgtgagccaccatgcccagccagatctttcttgtttttgatgtaggtgtttattactaaatacttccctcttaaaactgctcttgctgcatcccatacatttttatatgttgtgtttctgttttcactcattttaagacatttaaattttgtttcttaatttcttcattacccattggtcattcagaatcatgttatttaatttccatttatttgtgctgctttaaaagttcctcttgttattgatttctaggtttatttcattgtggtcagaaaggtacttgatgtgattttaattcttttaatttttgtgatttgttttgtggtttaacatgtggcctctccttgaaaatattgcatgtgcttatgaaaaaaaatatgtattctgtagctgttggatgaaaagatctgttagtgtcttttaagtccatttggtctaaagtcagtttaaacttggtgtttctttgttgattttctatgtatatgatctgtccattgctgaaagtagggtgttgaagtccacaagtattattgtattattgtattgtcttcccctttagatctaataatatttgccttacatatctgggtgctctgatattgggtgcatatatatttacaatttttgtatcctcttcctgatttcatccctactgtgtttgatacaaagtctcttatcgtaagtatagctactccttatatagtcatgattgtggtaaaaaaaaaaaaaaaagaaaagaaaaaagaaaaaaaatgtatagctactcctgcttgcttttggtttccatttgcatggaatatattctattccttcgctttcagtctgtgtcttttttttttttttttttttccagacatagtctcgctctgtcacccaggctggagtgcagtggtgctatcttggctcactgcaacctctgactcctgggtttaagcatttctcctgcctcaccctcccgagtagctgggactacaggtgtgcgccaccacacccggctaatttttgtatttttagtagagatggggtttcactatgttggccaggctggtctcgaactgacctcaggtgatccacccgcctcagcctcccaaagtgctgggattacaggtgtgagtcactgcgcctggccatatttgtgtctttagaggtgaagtgagtttcttataggtagcatatagttgggtcattttaaaaacccatttagtatatatcttttaaggtaggaatttaatctgtttacctcaaggttattatttttaagtgaagactcctttcattttgtggttttcagaatgttttgtatatcctttgttcttttcttcatctcttattttttatcattgtattttggtggttttctgtagtgataagatttgattttttttttctcttttttctttgcctatctgctctaccagtgagtcttatacttttatgtggttacataatggtgattattgtcttcttatttcccgatatagcattcccttgatcatttcttgaaaggctggtgtagtggtgataaattcccttaatttttgcttgcctgagacacactttatttctacctaatttttctctttcttttttttttttaagtggagtttcactctcttgcccatgctggagtgcagtggcatgatcttggctcactgcagcctccacctcccaggttcaagcgattctcctgtctcagcctctggagcagctgggattacaggcgcatgccaccatgcctggttaatttttgtatttttgtagagatggggtttcaccatgttggccaggctggtcttgaactcctgacctcaagtaattcgcctgcctcagcatcctaaaatactgggattataggcatgagccactgtggctggctatttctacctaatttctgatggattggtttgctgtgcatagtatttttgaccgatattttttcttttctttcagaaatttggatatatcatcccattttttcctggcctgtgaggtttctgctgttattctaatgaagattcccttatatatgacttgatgcttttctactggtacttttggatttttctctttgtctttgacttttgtcagttcaaatataatgtgccttggaggtgacctttttggggatctttgagcttcctggatctgaatgtccatatctctcgcaagacttgggaggtttttagctattatttcattgtctttttcgttttcttttatttttaatcttgctgtgatctccttagcagctataatttcattaaatatgttttatttttttaatttttttttttttgagacagagtctcgcactgtcgcccgggctggagtgcaatgacgcagtcttggcttactgcaccctccgcctcctgggttcatgcgattctctggcctcagcctcccaaatagctgggattacaggtgcacaccaccacacccagctaatttttcgtacttttagtagagacggggtttcgccatgttggccagactggtcttgaactcctaacctcatgatccacctgccttggcctcccaaagtgctgggattacaggcgtgagccaccacgcctggcctgttttatttaaaaagttgtattaaatatatatttttttctttttttcttttttttttgagacggcattttcacccttcttgcccaggctggagtgcaacggtgcaatcttggttcactgcaacctctgcctctcaggttcaagtgattctcctgcctcagcctcccgagtagctgggattacaggcacccaccaccatgcctggctaattttttgtatttttggtagagacggggtttcgccatgttgcccaagctggtctcaaattcctgacctcaggtgatccacccacctcagcctcccaaagtgctaggattacaggtgtgagccaccgcacccgacctgttaaatatattttctatgccttttgtcatctctttgccttctggaactctaaaaatatgaaatttttttcccttgatgttatctaataagtctggtaggctttcttcactccttgtcattcttatttattcttctctcactggtaattccaaacaaactctttatctttctttgcttgagtaagtttgctattgatgctctctattgtaccttatattttatacattaaattcttcagctgcaggattcctgtttggtgattttaaaatatttctttcttaaatttctctttcatgttatgaattgtttttctgattttattgaattatctttctgtattatcttgtatcctattgagggttttttgtttgtttgtttgtttgtgagacagagtgtcactctgtcacctaggctggagtgcagtggcgtgatcttggctcacaacaatctttgccttccaagttcaagtgattctcctgcctcagcctcccaagtagctgggactacaggtgtgcaccaccacacccagttaatttttgtatttttagtagagacagggtttcaccatgttggccaggcgggtcttgaactcctgacctcaagtgactcgcccaccttggtgtcctaaagtgctggaattacaggtgtgagtcactgcacctggccttgttgagtttttaaaagatcattattttgaattacttttttggtaattggtagatttccttctagcttgttaacggaaagttattgtgttcctttcatggtgacacatttccttgccttttcatgtttctattgtccctgcattgatgtctgtgcatctggtgaaacaatggcgtcttcccatttttctacagtcactttcatagaggctttcacctgcacttggtccttagtgtgctagttgagaagggtgtagtaactctgtttccagataagtgaaatggtatagtctttgttcagctttatcaacagtatttaatgttggcagtaactttgttttcctcagtggcctaggttgtaaaagtttgtagcagtaatggcataggttgttaatggcaagggcttttttggagtcctcctattttcatttgccccacaatgaagttacttagccatgaagatacttcttgctgtcaagtatgatatggcctataggcaggtacagtggctctgggttccaggtgcaggtgctcagggcagctgtgggtctggggttctaggctcagcatctgatgaacctattgtggcacctgggttttgagctatagatttgctccatgtggtagaattggaggtaggtttaccacagagccaagatctgtaactctgatgtactccctagcagcttgggcccaaagggccaggttgtagctttttgtttctgggcggccaggcacagcacaggcccaactctagggaagaagtggtgctttggagtattgggccaaggaaacagaatacagctgcagtttggtaacctgaaccattcaggctcattggcaacttgggtttctggcatagcacagtttttgtttgggccttgggcaatagggagcagcccagtgatgactcagctccccagggagaaagctgtctcagcagcccatacttcagggtgttagtcctgccccctggcagctggttatccagctagctccctaaagtgagtactagagttgtttggcctgtagtgtggggtgtctcatctcatgccctgctttgtttccctggaatgtgaaggcccatgccagctcagcccagtattgcatagctactcagttcaggcaaggcactgcatccccagagggtaatgtgcctcgtcagctcaggtctagggtgtgtgaccttaggttggcccaggcaccattttcctgggatgcaggaagctgcttcagattaggtactggactgtgtgtctgcttgggatggccaagacactgttacctggaaggcagggtggtaggtagggtgctgcttaaacttaggcactggggaggcatgactgctctcgatggccaaagtactgttttcccaggagacaaggtactgcttcagctcaggtacagaggggtgtgactgctctggatggttaatgcactgttttcccaggatgcctggcattgcttcagctctggcctagaggggcaggatgtagcagcatctgggaggggtaggtggaggagcttcgccaaggcatcctttcctcaggaggcaatgtgcagcttcagctcaggtccctggaagcagggcagttttgggagaagtagactgagaggtagacagtgagaggtggatgttgcacatctgccagagcattgttttcccaggagggagtgcacagcttcagctctagtcgaaggtgacaggacacagcctagcatagggacttgaggggtaggtggtgcagctctcccactgcatggccctacatgggaaggtggaaaagctgcttgtagatgttgggccaccaggtgggggtggatggtgatggcttatcctcagggatgaagaggtgccatggaaccagacagaactccagccgttccaaaataacagcacagtagctgtatgggccactgggggcaggacagtgtcagctccttcctcaggagcacagctgtatggactccaggcgggtccgtcagctaagcttagtgcctgtgagggctgtaggggaccccagtggtgagtactgtaggtgtccaaggtggtgatgtacgctgctggtatgctattgctcactttttccacatacggagaaattccttctggttttcagctgatcttggctgggggatggggttgtggagaccaggtgttccattctctgcttggctatcctgagtttctgtgctcaccagagtttttgttattactttgacatattctggtgctttcctttagttatttgcattaaaatgtatttgcttatttattttggctctgtgggggtggggagaacagcatttacggactgctaatctgccttcttgctgaagtcactctcttgctacagatatttggttggaaacattttcgtttgtattctgtaaataactaggagtagaattgctgtgtcatatgatatgtgtatatttacctgtataggaaactgccaagttgttttccaaaatggctgtaccattttgatttctcaccagtattttgtgggagctccagtcctacatctttttgagcacttggttttgttacactttaagtttttcaatttaacagatgtgtagaggtgtctcattgtggatttaaatttcattgctgaaatgactactggtattgagcattttttcatatgttcattgttcatatatctttagttatctttccaaatcttttttttttttttcttgagacggagtttcgttcttgttgcccaggctggagtgcaatggtgagatctcagctcaccacaacctccgtctcccaggttcaagcagttctcctgcctcagcctcccaagtagctgggattacaggcccccaccacaacgcccagctaatttttttattttttgtagagatggggtttcaccatgttggccaggctggtcttgaactcctgacctcaggtgatccgcccacctcagcctcccaaagtgctgggattacaggcgtgagccactgcaccagaccctatctgtccaaatcttttgtcccactttaaattgttttttcttcttaacattgaattttaagaattcattgtatcttttaatattctgaatgctagttatttgtcagatacatgttttgcaaaccatttatctgtatttggtttctttttgttatcttagcagtgtatcctgaagaatagttttaaattttgatgtaatccaaaatatttcggttgtttgtgttctttgttatcctatttttgttgttgttgttttatagatatgggggtctcactacgttgcccaggctggtcttgatctcctgaactcaagtgatcctcccacctcagcctcccatccttgtctacctaattaggctttgtgtaactcagtgttgcaaagctttgacatctgtttgagttaatgtttatatatgttgttacttaagggtttcacattaaatttaaacatacttatattttataaccaaacaagtcatgttggggcatactcattaggattgagtgctttcttacaccaaaatacatgtatacaaagatttaaaacactttcggccgggcgcggtaatcccagcactttgggaggccgaggcgggtggatcacaaggctaggagatcaagaccatctggctaacacggtgaaaccctgtcgctactaaaaaaatacaaaaaattagccagacgtggtggcaggcgcctgtagtcccagctactcgggaggctgagacaggagaatggcatgaacccgggaggcagagcttgcagtgagccgagatcaccccactgcactccagcctgggcgacagagtgaaggctatgtctcaagaaaaaaaaaaaaaaacttttataataacaactgtaaatagttcaattgacagtcatttgtaagatgtttaagtaaactgtgaaacagtaagtaaatggatgaaaacacactgattaaaactgctgcttttatccaacaagatggatgaatttcccaggaaagaatacttgagttcaggcctgttcaagtcccaacctgtttgtggtttgaggttgctctctgcctcgtagagcaaagtggaaaatttatcttctgggaggacagagttttcttctctgaaaaagtttcctacatagttggctttggcatttgcaaggaatgaaaggtcagggattgaggcctcatgagtctggatttctagctgaggttgagagaaaaggtagtgattgtaaccagaaaatccagagtgggtgtatttacctccagaactcatcacttaaaaaaaaattttttttgaactgacatgcttgaggctttttcttttttttttttttgagatggggtcttgctctatcccccaggctggagtgcagttgtgcagtcatagctcactgtagccttatcctcctggcctaagcagtcctcctgcctcaacctccctagtagctgagaccacaggcgcatgccacctgtgagtttctagagatgaggtctccctatgttccccagcctggtcttgaactcctgggctcaagtgatcctcctgcctcagccttccaaagtgttggattacaggcgtgagccactgtgcctggccagagctcatcactgttaactcagcctgggtttttcacagcagtcatggaaatagattcattaataatagtaacaaatatatagtctccctctcaaagaaaccttgagtggcagtggcataccagatacacagtaggaaatactgtagaattatgttgttaagttcataaccaaacatcatacatgatgataaaagacaagataatggtcacatttatgcagtattaactgagagggcaaatttgtgcctgagaagctattgggaatgttctctctctttgcattactaggaattacatgggaaacacatgtagacagtcttcaggctattaagatttgtccacttaatctttacttatacatgaataaaaaatgggaaaacatgataaatataataaactaatacactcaaccctgccccttgattatataatagaacaaaatcagcatgcccggcatgagcctgccagattgccaattccatcctccaccttcagaggatgccgccatccagaattttgccttactcattttactttcttcatagttcgacaccttaaatgtatattactaatagtagctttgcatttttggctgatttaaaaattgatataaatgaaataatgctgtagagatgctttttggtattaagtggatatactgttattcttaaagatgtttgaaatgaatatacctttctaaatatctttttaaaataatacattaaatgatactgctttagaattcatgaactgcatctcatgagaatatgtagagatgacgtgggcaggtaaagtaaaacttcaggttgaatatcctatgataatttaaaaatgacaaaatagtgtggtgaataatagagcttgagcactttaaggcaccgtagggaccccttcaatgtaatgatgacagtgctgaggtgcagagaagttaggtaatcagcccaagccactactctaaggacagaccctatctacttttcctaatttgtcagaagactgcctatgatactactaataaaaagtcctatgaaattggtattgtcattattttacaaataaaataatcttcaatttttgtttcctctatgcatgggttacttagtattttgtaatttgaatttcaagcataattaaaaagaaatcaggtatctaggctgggcatgatggctcaagcctgtaatctcaacattttgggaggctgaggcaagaggatcacttgaggccaggagtttgaggtatcttttgttgatctctacactgattgtattctctcttttattctatgaaagttaaagattttttctgatactacatattgtcagttttttaaatactcagtttgtgctaaaagaaaacattcggcaactgatatctgctgttctgtatgtatctgtcagtccagatttgtccattatggtgtatgaatctaatagaacctcaccaatgttatacctgccttcttgaaatcattactgagatagctaatattaaaatatcctggtttgtctgtatatttaattctttactctcattatactaaatttttttaatgtaatttgaattgatggtaaaaattgtatacaggccgggtgcagtggctcactcctataatcccagcattttggaagtcctatgcaggaggattgccagaggccaggaatttgagatcagcctgggcaacatagtgaaactctcatctttataaaaagtaatattaaaatttttaaaagtgtataaactgtaaagtatattttactggtgttttcttccttattcctacttgtcagatgcaaatacacatttttgtgtgtttgtgtttagtaattataagtatacatatttcattcttctatttcatatatttctatgacattatatcttagatgtgtaatttatgaactactactggattattttaatccattagaaattactattcacgcattctgtattcaattcatgtgatagctaatatatttggttttaaatgcatcttattttgtggttttcttctaggctgttttttgtgctttcttttaaaaatatataggttttaataatcttaattttcttttagtttgaaatgtatatactcattttattcattagtctaagataagaattgtaacacttctctaacctattatagaattgttaatacctttacccttctcttgaacacatcaaaggatgtcattgagtgttggtattggagtatagcatatctattattctgctcaattagaagatattgttcatgttgtatagagataataagtaattgtattgatctgcagatgcatccatctcttggattctcattccttctaccactgcagaactttcacctgtaatcactttcctttggccttaaggataacttttagggttacttttctactaaatttccaatttttgaccagatataatcttatattgtgctcttcctgaaaaatactattgttgtggatagaaatctgggttggtagttatttcttcagcaatttgaccatgtcattccactgtgtccctggcctcctgtatactggatgtgaatggatacaattatatattgtgtttatagttttcctgtgctataggaacagtattcgaatctgatgcaaaggacaacacaccctagagattgtaacagtgagatgaaccaagtgattggatggggttttgagttgctggaataatggagttacagtgtacaatgcataagcaacataataaattatatatctggtgaacaaatggatggattgtgccatgaactggttagatgcttacccacatgtcacagaaggtcttcacttgcaaggagggtgggaaatacctcttggtcagctctcaacttgtgcagcatcaggcctctttcaatggggaagagccacacaggagcaatgagagtggggaggcttttcacactggacaaagggattccaagtacagcaattgtgggaaagccttttgctgcaaatacatactttttcagtatcagaaaatccatgctggagtaaacccttatgagtgcagtcagtgctggcatacctttaataacagctactattctatagttacccaagagaattcacagcaaagctgtgccttatgagtgcagtgattatgggaaattatttggctccagctctaatctccatatacaccaaatagttcacacaggatcaaggctttaagagtgtgttggccaggcatggtggttcacacctgtaatcccagcactttgggaggctgaggcaggcggaccgcaaggtcaggagttcgagaccagcctggccaacatagtgaaaccccgtctctagtaaaaaaatacaaaaattagctgggcgtggtggtgcgcgcctttagtcccacctactcgggaggctgaggcaggagaattgcttgaacctgggaggcagaggttgcagtgagccgagatcacgccactgctctccagcctgggcaacagagcgagactctgtctcaaagaaaaaaaaaaaaagtgctgaatgtgagaaagcctctatcactagacctcatcctgtttagcaccagagaattcatagtggagaagaccttatgagtgcagatcatgtggcaaattctttataaagacacatttgttgagtaccagaaagtccacaatggaaaaatatcttctcagtgtggtgaacgtgagacattctaaagccacaattcttaccgtggttaggctttgtgtccccacccaaatctcatcttgaattgtaatccccataatccccagtgaccagggtaggacctggtgggtggtgattagatcatgggggcagtttcccccatgctcttctcctatagtgagttctcacaagatctaaggggttttttgtttgtttgtttgaaacggaatcttgctctgttggccaggctggagtgcagtggcatgatcttggctcactgcaacctccgcctcctgagttcaagtgactctcctgcctcagcctcccaagtagctgggactacaggtgtgcgccaccaggctcagctaatttttgaatttttagtagagacggggtttcgccatgttggccaggctggtctcgaactcttgacctcaggtgatccacccatctcagcctcccaaagtgctagcattacaggcatgagccaccgagcccagccctcaatctgatggttttataaggggctctttcctgttcgctcgttcgctctctctcacctgcctccacgtaagacgtgtctttgcttctctcttgccttctgccatgattttaagtttcctgaggcctcccgagctatgcagaactgtaagtcaattaaacctctttcctttataaattacccagactcaggtatgtctttatagcagtgtgagaatggagtaatggactatcttgtaacatgttagagaattcacaatggaacaagatcttgtgtgttcaggaaatgtgggaaagcagaaattcccacattgcttggcaaatgaaagtcaaccagagaaaggccttttgtagcagatataagaaagcatacagtgaaggcctaacctcattaggcatcagaaaatttacactggagagaggccttaagagttcatggaatgtgctcattgtttaacatggcatgatcctaagagaaaatctctgagagtaacctttgagagggagctctaagccaggatttgaacctcagacatatgtgtattcacactgtggagattacctacaactgcatgagtgatcagaaacaaatggggtcctcatctatttccccttagtggtttcagcgtggatattatccagctgcagcctaaaagatctgagctggggcctgctgtggatttcaagaggtccccatccttaataaacagtgttgaccccacatggtagctgagatggatttctccaaccagcttcccaatccaccaaccttagatatgcccacctcatgatgttctcatttgtgcagagataaatgccatagtgtttaacccttcaatctgttctgttcattgtgtgggactgattgagaaaagaagggctttgctagcagggaccaccaactttatgtgcctcagagtggacagcaggatggtagagagtagctctaagtctagtttggcctgttttgcaatgctacgcaacgtctcttagggaaaactgtagggcattgtgagactgatcttgtgacctggatgtcaggatctctgtgagccctaagctcaccctcatgagggagtagttggtgtgacaacctccagtgcttctagaaacagcataagttgagtccctttttcccagaggatgtgtcatattccatcaattctgttgaggggtggctgtctcctaggacctctatgcagaggacattgcccctgaaatctaaaatctggtaggcatgtaagacctacaggggctaagcaggaaacagatacagaaacactacatacagaaacattggatagtagggagtagtggagactgggaaactagaagttatgtgtgtactctaaagggggatacacaaatttaatgtaactatgactctgcgatgagggtgtacaaaaattctcacgaccggctgagctccttttctcctatggctgaggccggtgtgagagcaaacaatctgaaagtttgtgaattcctgtacctccctgggctgttgacattttggtcatcactgaacaggcaggaaccccaggactgacaaaagagagcttggagtcgatcgtgcatcttttgtgacccagtcagcatgtgggaagtgatggccttcattgctttctagtttttgctgccactgaaggagggctgactcaagatatgggaagagggagagagttgaataaatacaggattgattgattcagatttttatgtggaaacttttttttcttaacacatcaatgatatataattggcatacaataaactagacatattgaaattgtataatttgataaatttcgacatgtatacacatgtcaaaagtttcctcatgccccttactaatctcctcttattctccaatactttatccccatgtgaccattgatttgtttaatgacactatacattagttagtattttctgaaattttatataaatgtaatcatatggtatgtgtttattttttatctgtctttcagtaaactgtttctttttagatttggggggtacaagtgcagttttgttatagggatatattatgtattggtgaagtctgggcttttagtgtgactgtcacccaaatagttcacattgtacccaatagacaatttctcatttttcaccttttttcccttgttttgtgggtttattttcaacttttattttaagctcagggggtccatgtgcaggcttgttacaggggtaaattgcatatcactggggtttgatgtacaaatgattttgtcacccaggtagtgagcatagcacccaacagaaagtttttttgttttttgtgtttcccttacccttctcccacactctcccatcaagtaggccctggtagctatttttcccatctttgtgtttatgtgttctcattgtttacctcccacttataagtgagaagatgcagcatttggttttctgttcctgcattaattcatttctgataatagcctccagctccatccatgctgctgcaaaggacatgatgttttttatggttgcatagtaatccatggtgtatacataccactttctttattcatttcactgttgatgggcatctaggttgattcatgtctttgctattgtggatagtgctgcaatgaacatacaggtgcatgtgtctttttggtagaacgatttctattcctttgggtacataaccagtaatgggattgctgggtcaaatggaaggtctgttttaagttctttgaaaaacatccaaactgccttcctgaatagctgcactaatttactttcccagcagcagtgtataagcattcccttctctccacaaccttgccaatatctgttactttttgactttaaaacaaccattctgactgatgtgagatggcatctcattgtggtttgatttacatttctctaatcattagtgatgttgaaccttttttttcatatgcttgttggccacatgtatgtcttcttttgagaaatgtctgtttatgtccttggctcaattttttaaatgagattggttgttgttttgtttgttactttgcttaagttccttatagattctggatattagaccttgtcagatgcacaggttgtgaatattttctcctattctgtatgctgtctgtttactctgttggtggtttctttctctgtacacttcagtttaattaggtcccatctgtctatttttcctttgtttcaattgcttttagagactttgtcatgaaacctttgccaaggcctgtgtccagaatgatattttgtaggtttcttctaaggttttttatagatttaggtcatacatttaagtctttaatccattttgaactgatttttgtatatgatgaaaggaaggggtccagtttcagtcttctgcctatggctaacctgttatcccagcatcatttattgaaggagagtcctttccctattgcttgttattgcttactttgtcaaagatcagatgtttggagatatgtggctttatttctgggttctttattctgttctagttgtctatatgtctgtttttgtatcaatatcatgctgttttggtcactgtagcctttaagtatagtttgaagttgggtactgtgatgcctccagctttgttctttttgcttaggattgctttggctatttggactgttttttggttccatgtgatttttagaatattttttctgattctgtgaaaaatgaaattggcagattgatgaaatagcactgaatccataaattgctttgggcagtatggctattttaacaatattgattctttttatccatgagcatgaaatgtttttccatttgttttggtcatctctgatttctttcagcagtgttttgtaattcttgttgtagagatctttccactccctggctagctttattactaggtattttattctttttcttgactattgtgtatgagattgcattcttgatttggctctcagactggacattcactgtatattattggtacatagaaatgctgatttttgtacattgattttatatactaaagctttactgaagttatcagttctaggagcttttgtgcagagactatggggttttctaagtatagaatcatatcctctgcaaagagagatagtttgacttcctctcttcctatttggatgccttttatttcattctcttgcctgattactctggctaggacttccagtactatcttgaataggagtggtaagagtgagtatcgttgtcttgttctgattcccaaggaaaatgcttccggcttttgcctgtctggtataattttagctgtgagtttgttatagatggcttttgttgttgctttgagacaaggttcttgctctgtcacccaggctggagtgcagtgatgcaatcacagctcactgcaacctctgccctcctgagctcaagtgcctcccacctcagcctctcgagcagctgagactacaggtgtatgccatcacacctggctaatttttgtgtattttgtaggaacggggttttgctatgttgcccaggcttgtctccacctcccaaagtgctgggattataggtgtgagacactgcacctggcccatagatggctcttattattttgaggtctgtttcttcaatgcctagtttgtggagggttggaagggttgttaaattttattgaaagccttctgtgcatctattgagataaccatgtggtttttgtttttttgttctgtttatgtgatgaatcacatttcttaatttgcatatgttgagccaactttgcatgccagatataaagcctgcttgagtgtggtgatcgtggtggattagctttctgatatgctgttggattcagttaactagtattttgttgagaattttgcatttatgtttatcagggatattggcctaacattttcttttttcattttgcctctgccaggttttggtatcaggatgactctggcctcacagaataagttagggagtagtcccgcctccttgattttttgggaataatttcagtaggattagtaccacgtctttttacatctggtagaatacaactgtgaatccacctggtccagggctttttctggttggtagctttttaattactgattcaatttcagaactcattactggtctgttcaggatttcaatttcttcctggttcaatcttaggaggttgtatgtttcaaggaatgtatccatttcttctaggttttttagtttgtgtgctaagtttttagttcttaatagtctctgagagaattttgtacttctgtggggtaggtggtaatgtcacctttaacatttctgattgcgtttttttgcatcttcttttttccttattaatctagctagtgggctaccagtgttgtttattcttttgaaaaaccaacttacggttttatgatctttgtgtagattttcacatctcagttttattcagttcaactctgatattggttatttttctctgctgcttttctttcttttggggttgttttttttttcttttagttcctctaggtgtgatgttattttgttaacttgagatttatctaacttcttggtgtaggcattttgcactataaactttcaacactgctttagctgtgtcccaaagattctggtatgttgtatctctgttttaattagtttcaaggaatttttttatttgtcttgatttcattctttacctaaaacacattcaggagaagattgtttaatttccatgtaattgtatggttttgagagttcttctaggtattgatttctgtttctactgtgctatggtctgagagtgtggttggtatgactttttttttaattgttgagtattgctttatggccaagtatgtgattgatcttagaatatgtgacatgtgcagatgaaaagaatgtatgttctgtggttgttgggtagagtattctgtagatttctgtaaggtctatttggtcaaatgtccagtttagcttccaaatacctttgttagctttctgccttggtgatgcatctaacactgtcagtggggtgttgaagtctcctgctattattgtctggttgtctaagtcttgttgtaggtctctaagaacttgtttcatgaatatgggtgctccagtgtttggtgcatatatatttgggatagttaagtcttgttgaattgaatcctttatcactatgtgatgcccttctttgccttttttgatcattgttggtctaaagtctgtttcgtgtgaaatagcaatccctgctcttttttttcccatttgcttgatctttctccatccttttactttgtgcctatgggtgtcattgcatgtgagatgtgtctaatgaagagaatacacagttgggtttcatttctttttccaacttgccaccttgtgccttctaagtggggcatttagcctatttacattcaaggtcaatattgataagtgaggatttgatcctgtcattatgttgttagctggttgttatgtggactttattgtatagttggtttgtagtatcaacaggatatgtgctcaagttgtttctgtggtggcagatactcatcttttgcttctaggtttagcactgttttaaggacttcttgtaaggcaggtctggtagtaatgaattcccttaacatttgtttgtctgaaaaagattttatttatccttcacttaatgaagtttagtttggttggatattaaattcttggttcaaatttctttcatttaaaaatgctgaatataggcccccagtctcttccagcttgtaaactttctgaaaggtccacggttagcctgatcgggttccttttgtgggtaacctgccacttctctctagctgcctttaatgtttttcttttgtattgaccttggagaatctgatgactatgtgtcttagggatggtcatcttgtataatatcatctcacaggggttctctgaatgtcctgaatttgcatgtcaacctctctagtgtggttggggaaatgttcatggacagtatcatcaaatatgttttccaagttccttgttgtctctccatctctttctggaatgccaatgtgttataggcttggtctttttacatatcccatatttcttgtaggttttattcattttttaaaattcttttttctttatttttttctgctgtattggttcaaaggagtcgtgtttgagctctgagattattttctttttttttgtgggatagcaaacacttatttgaagaacttttaggataaaatttagtttacctctgataaagctgaagaaaaatgattgcagtttttatgcattaaatgataaacattgcctttgtattcttttcccagttcttctacaattttttctatatcatcttctaggaagtccgtgctccctaaaacaacttctttaaatttaaatggttctcctagttcagaagcatttcctggggaaatttcaaatattccagaaaaggggtaaggatggccaccataagcaaattctctgccatagacttcaatttctgaatgaaaaactccaattccaatggatgaggtatattccttcatccaatacatgtcacacacgttgagcaccactaactggttagcccccatcctcctccccgcggccgccgcctagtcctcaagccgctcggtctccgcggggccggaggccgctcccacccccgcgggcgcttcaaggggcctgagccgggcactaagcgtacagccctgcccgtggcagccggggcagaagcatcgggcagccaagccactcccgggcgccaacgacaggagcctctgtgcggacagggccggacagctggcggcccgctccggatgaggcacctcccctaggcggcagacacatggggaaaaactgagctctgagactattttctaagcttggtctattctgttgttagcgcttccagttacattatgaaattgcaattgctgtagttaatttcttatttccagaagttcagtttgatgactctttttcttttctttcttttttttctttctttttttttttttttttttttttttgagacggagtcttgctctgttgcacaggctggagtgcaatggcatgatcttggctcactgcaacctccatctcctggatccaagggactcttgtgcctcagcctcccgagtagctgggattacaggtgcctgccagcacacccagctaatttctgtatttatagtagagatagggtttcaccatgttggtcaggctggtttcgaactcctgacctcaagtgatccacccgcatcagcctcccaaagtgctgggattacagacgtgagccaccgtgcccagcccattttggttctttgttaatatggtaatattatatttaaactcttggattgcattattggtttccttggatttttccttccttgccatccagactctgaattctaagtcatttcagccatttaagcatggttccaaaccatcactagggagctagtgcagtcgtttggagacctttagagttgccagaaatcttgcactggttctttctcatatgtgtgggctgatgttccttgaatctttgaagttgctctcctttggatggggctttctgcttttatattatttgatgcccttgggagttttactgtggtataagttgggtttagtttcatggtttcaattatgggtgctttcacaggccaaggctcagctgagcactcctgagctgcatgctgtaaacctgggtagaggggattaagcccttggctttgttctctggctgcttggggtgaagcacctgctgtgctagaggggctgaggtgttctcagtctgctggcaaaagtgctccagcagagcattgtggggactgcagagagtgcactgtggctgggggatggggaggccacaggcaagtgtgcaccacttgggcagtagaggggggctacctgcaagtgtgtgccaatggggtggcatggctgtggtgtaggtgagtgaagcaccatggtgtgaggggtccccggcaatgcctcccacctttttgaatctccagtgtctattattccactatttccatatgtatacatcatttagctaccacttataagtgataacatgcagtatttgactttgtttctgaattatttcacttaagagaatggccccccagttccagccatattgctgcaaaagccatgattttttttaatgactgagtagtattccatggagtgtatatatatatacacatatatacatatacatacatatatatacatatatatacatatacatacatatatacatatatacatatacatacatatatatacatatatatacatatacatacatatatatacatatatatacatatacatacatatatatacatatacatacatatatatacatatatatacatatacatacatatatacacatatatatacatatacatacatatatacatatatatacatatacatacatatatacatatatatacatatacatacatatatacatatacatacatatatatacatatatacatatacatacatatatatacatatatatatcgcattttctttatccaatcatctgtcgatggacacttaggttgattctatgactttgctactgtgaatagtgctacagtaagcatgtaagtacaggcatctttttgatatagtggtttattttcctttaagtaaatacccaatagtggaattgccagatcaaatggcagttctattttcagttctttgataaatctccatactgttttccatagaggttgtactaatttacattcccaccaatagcatataagcgttcccttttccttgcatccataccaacatctgttggttttttactttttaataatagccactctgaccagtataagatggcatctcagtgtgtttatgtgtgtgtgttttctctcatcatatctcattataacctcaaattcctgggctcaagcaatcctcttgcttcagcctcccagtgtctaggactacaggtgtacaccatcatgccttgctcttttttttttttttggtagatataacatcttactatattgcccagggtggtctcaaactcctgacctcagcaattattttgtgttggcatcccaaagcactgagattacatatatgagctacctccctaaaataagggaagtgagccagaagctctgggcccagcccatgatctcaatcggggcgaatatccccgcctcctgacctcaattttcctaagctagaaaggacctttcgaccctccgacttgtgcccatagtaaagcggcggccctaagacgacgcgggggtccttgtgcgcacttaaatggagtcggctgcgcttggtgagttcccacacccggtagatgtgagggaaaaactgccttactcagaaggcaccaccccttgcgtcggccgcggactctaggccaatgacgggccaggacacgggcgatttctgcgggccagggcggcggaggtgggacttccgcttcgtcgcgtgacgtcatctccgtgagcaggattggccctggaacagtgtggggcctggaccgctgggtaggcgcgtccagcggcctgagcaggggagggtaatgaggctgttacgcgccttctccgcatcttggcgggagcctgacgccccgcttcttccctaacggggtgttccaccggcgcctgccgaggcctaggcctccgcagccgccctccgtctcctcagccccgacgctgcgcccgctttgtgcgcatttttctctggggaaactgaggctccgagtgcgaaagtcagccgaggtcgccccgcccaggacagagaagggctgggggtcggctgagccgcggcattcccgggccccgctagggctgcagggtctcaggatggcagcctcggcgcaggtgagtggacgaggttttggccttgctgctgctctgctacttctggaggcctcgtgggcaggcagaagccaagacagccacaggatgtttctttgtcgccgtcgtttatttaagagaagtggccgtagcttgtcatttcctttatccgcagtcctgcaatagtgttggcctccgacaggtgctcagtccttggtagaaggatgaatgatgcttccttcatggatctcatcacacttcccttaaatccaacctcctctgttgcctgccagcccctaccccatccacctggccaaccacccctgaccttgtctctccatttttcccttgtcctttgctcttcagagccaccaacctgaccgtgcagtcttcttcctttttccaggctttctctttgcacttccctttgccttgaacactgcccctataacttcgcagggcctccctctcatatctttctggcctctgtccagatgtcacctatttggaggtggctttcttggcaattccggctaaagtggcgccttacgcacttgcccatttttggcaatgtgtggcatttttgtatagagaatctgacgatattaaagaagcttgccgtttgagttggtctaggatgttatgtgaacaaagagaaacgaaataattgcaaagagtgacagctgatcataaagagtccttgctgtgggctgattggcaggcattatttaaccctcagctcctttaatcctgaactccttagaattaggttctcttgtcctcactgttttacacaagagcagctggaggctcacataggttcaattacctgccttacatcactgtagctcttaagtatcagaaactaacaactggtgtgtctaccatcacagcctgtgtttttaccctcttctttgcccgcaatggttagggaggcctgggggtgacacctaaagtaaactttgcaagttgagcaggcttccttctagcaggtggtcttggacatgaggagtcatggcatttcatgctggtggaactgtgtggactaaaaaaaaatggtttattggttgtttaaggagtccgcaggggacccgtgtggcttccacagtggtttcctgagtggttttctcctataccagctgacacatgtcttgggacacaagattttgtggtcttttgctagatgtgccttcctccttagccaggacagacatagccagtcaggggcccatgttctcatggctacaacctgctgtgtcctctgtgactcttgttccttgctcctgaagtatcctgacctcagggatacttgttggtaggactcaaacaggaaaaggtagtgatagctcgttgtggattcttcctatgagaatgggcatctgtgaggcccagaagtgtccgaggcagcagatgcaggtccaggccctgccacttttgaggcaggtgccaccacctcaggtgactcttctgtgaggtaggtgattatgactatgctgctctgcccaggtccatgaaaatatttcaagtggctaaccccagcacagtggcatgtgtctgtatatccagcttgggaggctaaggcaggaggatcatgagttcaagcccaacctgggcaaaatattgagaccctgtctcaaaaaaaaaaaaaaaaatcctgaaaatattttcagggtggctcaaatggatgtatttcaatgtttcccatcctcattaactgtgcattaactttgctaatgaaggagtgtcgggttgcatgattagaacatagaccatagggccctgggttcaaattctgtctctcctgataagagatgtgactttgggtagactagtggaggtcctggacctcaagtctctgagtgtgacatggagatgatgatggtgaactcaggagctgtggccctttgccccagtgtttcctttacagcttttcttcagatcttttgactattcttggtgaagtggaaaaccctgttgtgttgacctggacatcagggctcagataaatgaaatgagatttccaaggtcacatagcaggcttgtgttgatttcaggaatttggttttaaacctcaggagtctgactcctgagctggggacttttagtcactttaccatggcatgtaaagccattagcatgaggcaggctcacagggaggatcggtaagactcaggtgctgttcttgttgttgttgctggtgttgtttttgttattattctttcccattcctctgatgtctcagagcacttactgtcttgcctctcagtccccttaggattgtcctaaccttatttctgtgtgaagtggctttctgcataggaggcttctctctcttcactgctgtaatttttttttttttttttgagacgagtctcgctctgtcacccaggctggagtacagtggcacgatctcggctcactgcaagctccgcctcccgggttcacgccattctcctgcctcagcctcccgagtagctgggaatacaggcgcccgccaccgcgcccggctaatttttttgtatttttagcagagacggggtttcaccatgttagccaggatggtctcgatctcctgacctcgtgatctgcccttcatggccccccaaagtgctgggattacaggcgtgagccaccgcgcctgaccgacactgctgtaatttatccaaggcaatgtccacattcccctcatgcctggcacagatcatggccctctagagatgcttggtgatttgattcttgggtcactgcgcatcttttgcagtgctgaagtgacaagttctagttgtattccacagttccaagggaaacactactatctctgtttaattttccaggtgtctgtgacctttgaggatgtggctgtgacattcacccaggaggagtggggacagttggatgcagcccagagaaccttgtatcaggaggtgatgctggagacctgcggacttctcatgtctctgggtaaggccccttctggtcctgtgctcccttaggattgagttctcctactcatgttcccctctctcctccacagcccacttgttctgaggctcctggcaccacgcaggggtgttcaccattggctctgagcgtagcacttgggagaccagggtctggtgtccaggagtccactcccatctccactgctcatgatccctgtgttcctgggcaagttaaggaatccctctgtgcctcagtttttctcatgaataaaaagggccaggccaggcacagtggctcatgtctgtaatcccagcactttgggaggccgacgcggacaaatcaggaggtcaggagtttgagacaagcctgggcaacatggtgaaatcccgtctctactaaaaatacaaaaaattagccgggtgtgatggcgggtgcctgtaatcccagctactcaggaggctgaggcaggagaatcacttgaacccgggaggcggaagttgcagtgagctgagatctcatcactacactccagcccaggcgacagtgtgagagagactccgtctgaaaaaaaaaaaaaaaaaaggccaatatagtatttgtttcatagggctagtgtgagggcaaatggttcagtagagtgtgttgtgataggtggctgggcgcaggttagcaattgtgacctctgttgctgtcactattgtcactgctgtctaaatcattgtcctcataatcagcagtatcacacttggactccgcagtttttggaacaactttgtatagttttttagttaaattggccagatgcttttgatgactagactcaggtgtacattttggcttggccattcgccatttcccagattttggcaagtcactttatctgcctgagcctcgatctcttcatctataatgtggtcctgattgcagtacattcttaatgtgcatcctgtgaagaaatcctaaaatagaatttttcatgcagggaccataggagtagcaatgtaatgctttgcttagaatgtaaaaaaaaagccttaggtcagtgaagaaacttacctttctcctgaatggagactcagtatctcaaatatgttatttcttttctaaactaatgactaaatttaattgagtgtttataaaatacaatgcatttaaattgcttggcatattccctaggttatagttacattgtataaatatcagttattgacatactattaggagtaaagttctatggccaggtggcatattgattaaggacttggatttgagagccacagcagcaaagtctctccaagaagtgacatttgagctgagacccaaagagtgagttgattagaaggagcaagatagaggagcaagtagtattccaagtaggcaggctggcatgtgcaaaggccctgaggtggtgaagagcatgatcctgacaaagctgaaggaaggtctgattcccctttttcactgcactgtcattgaacccagtgccaagcacatagcaaaaatgagtgaacatttgcttagagatgactgatgaatcccaccctgtgtttttgtgggtcctactgcctgtgccattaacttctccatagagtacttatgtcttttacccccttatattttgaaaagttttgggctatatgtgcagatcagctcatacagtcttaaccctgaaggaaatatattatctcacctaataagcttagtggtaaggctggctcctgggttggtgggtgtcaagccagttgtctttctttgctcccactttcttttttcttttttggagacagggtctcactctgtaacccacactggagtgcagtggtacgatctcagctcactgcagcctcaccttccagtctcaagtgatcctcccacctcagtctcctaagtagctgggaccacgggtgcatgacaccacacccggctactttttgtatttttagtagagatggggtttcaccatttgccctagctggtctcagactcccaaagcgttgggattacaagcgtgagccactgtgcccagcctctttgctccctcttcttggtaaggtttttaggcaggttccctcacagaattcccaggatgctgcatggcagcaggagtggcagcctccctcatttagcccttcctgaaagagaaggttttttctctctttggagtggctggtataggtcacctgcctacctcagagtacagttgatcagggttgccatttgcaagatgatggagaccaggacttttctactgccatggggactaattataaaatcccttcagaaaatttgtcttaacagggttgagatttttgtaggatggagattaaaagtaattggtactatcacacagccagcactactgcttacagtctttggggcccaatgaggatgttttttttctctttttttgagacggagcttcgctcttgtcgcccaggctggagtgcagtggcatgatctcggttcactacaacctccgcctcctgggttcagcctcccgagtagctgggactacaggtacccgccaccacacctggctaactttttgtatttttagtagagatggggtttcaccatgttgggcaggctggtctcgaactcctgacctcaggtgatccacctgccttggcctcccaaagtgctgggattacaggcatgacccactgtgccctgccagatggtgtttttgtggttgttttatggtcacggttcaacgttttctttgcttggctgagaatagcttcacttcatggtcttccccatcctgcagtcccagatcagattgacaggtttctttcttctaacctaactccctgtgtcctcttttgttctccatgcacaggctgtcctttgttcaaaccagagctgatctaccagttggatcacagacaggagctatggatggctacaaaagacctctcccaaagctcctatccaggtaggagccaacagctgggaaggtgggggtcatggcagcttacacatggaaaagtgaacactgcctctgaattttgtgggcaatcttcttattgtggtctctctgggtgcttgggatccatggagcctctccccgcccgcccccccccacccgccttcagacagggtttcactctgtcactcaggctggagtacagtgatgtgatcatagctcactgcagcctcaacctcctgggctcaagggattctcccacctcagcctcccgggtagctgagactacaggcatatgcaccatgcctggctgagtttttaaaattttttatagagatggtcttgttatgttgctgaggctggtctcaaactcctgggttcaagctctcctcctgcctcagtgttcgaaaatgctgagccaccaagcctggcctcttacatcttaaatttaagtacttccaagttaggtcccagatgtatatatttcactaacgcataataaaaaattatggctaacatgtatttatttcttactcagtgccttgctctctgccgacgatagtatatgtagtgtttcacttcatcttcactatagtcttacaaggcagactctatttttggccctttttgtttgtttgtttccgagatggagcctcccactgttgccctggcaggagtgcgatggtgcagtcttggctcactacaacctccgtctcctgggttcaagtgattctcctgcctcagcctcctgagtagctgggattacaggcgtgcaccaccatgcccagctaatttttgtatttttagcacagacggggtttcaccatgttggccaggctggtctcaaactcctgacctcaggtgatctgcctgccttggcctcccaaagtgctgggattacaggtatgaatcactgtccctggcctttgttttttctataatgccatctctaataagcctttttgtgtattgtgttcgttccaggtgacaacacaaaacccaagaccacagagcctaccttttctcacctggccttgcctgaggaagtcttactccaggaacaactgacacaaggagcctcaaagaactcccaattagggcaatccaaggatcaggatgggccatctgaaatgcaagaagtccacttgaaaatagggataggcccccagcgggggaagctgctggagaaaatgagttctgaacgtgatggtttggggtcagatgatggtgtatgtacaaagattacacagaaacaagtttcaacagaaggtgatctctatgaatgtgattcacatggaccagttacagatgccttgattcgcgaagagaaaaattcctataaatgtgaggaatgcgggaaagtgtttaaaaagaatgccctccttgttcagcatgaacggattcacactcaagtgaagccctatgaatgcacagagtgtgggaaaacctttagcaagagcactcatcttcttcagcacctcatcatccacactggggagaagccctataagtgcatggagtgtgggaaggcttttaaccgcaggtcacacctcacacggcaccagcggattcacagtggagagaagccttataagtgcagtgaatgtggaaaggccttcacccaccgctccacttttgtcttgcatcacaggagccacactggagaaaaaccctttgtgtgcaaagagtgtggcaaagcctttcgagataggccaggtttcattcgacactacatcatccacacgggagagaagccctatgagtgcattgagtgtgggaaggccttcaaccgccggtcatacctcacgtggcaccaacagattcacactggagtgaaaccctttgaatgcaacgagtgtggaaaagctttttgcgagagtgcagacctcattcaacactacattatccacactggggagaagccctataagtgcatggagtgtgggaaggcgttcaaccgtaggtcacacctcaagcagcatcaacggattcacactggggagaagccttatgaatgcagtgaatgtggaaaggccttcacccactgctccacttttgtcttgcataaaaggacccacacaggagaaaaaccctatgaatgcaaagaatgtggaaaagcctttagtgatagggcagacctcattcgccacttcagcatccacactggagagaaaccctatgagtgcgtggagtgtggaaaggccttcaaccgcagctcacacctcacgaggcaccaacagattcacactggagagaaaccctatgaatgcatccagtgtgggaaagccttttgccggagcgcaaaccttattcgacactccatcattcacactggagagaagccgtatgaatgcagtgagtgtggaaaggcttttaatcgcggctcatccctcacacatcatcaaaggattcatactgggagaaaccctaccattgtaacagatgtgggaagaccttttatgactgcacagacttcagtcaacatccaggaacttttattagggaaagagtttttgaatatcaccactgaagaaaatctgtggtgaaagggaacatcttaccatctggccattcacactgaagagaaacttcataagcatcctctctttgagaaaacgtgtaatagatgatcatttgtcgtctaaacaatcaagttagaaattgaaccagcctggagtcttattctccacctgagaattcacccatgagagagacccagtggttgctatgcacttaggaaaactttcagccacatctttcttcttagtttacagtgaaatattatctcagggatattttttttttttttttgagacggagtctcgctctgtcgcccaggctggagtgcagtggcgggatctcggctcactgcaagctccgcctcccgggttcacgccattctcctgcctcagcctcccaagtagctgggactacaggcacccgccactacgcctggctaattttttgtatttttagtagagacggggtttcaccgttttagccgggatggtctcgatctcctgacctcgtgatccgcccgcctcagcctcccaaagtgctgggattacaggcgtgagccaccgcgcccggccatctcagggatatttaaacaaaggaagaggaaatatagggaagagaaagaaaccacagcttcttttagacttgtctgacaagcctatggcaattttgtcgtccctttgttattttatgtgggagagggaaatgtttcagaaacgaaagatctcatcccctttatttttctgtgtatgcattcactgctgcccagtgtcagaacagttatacaaacgagggcttgaaaacattttgtgaaaacttgcttagtcctgcaacgttctccactctcgaggtgcagaagcatacatctttataaaaaatatggaggcttgagttatgaaacacttttataaggagataaggatgtacatatgtttggacacattgtccacttcagatgcttgtttaaaaaaatgtttcaccatgtgtctttacccaatacacatactttttcttgatgtggatttactttttttttttttttttaagttttcctgggatagggatgatagtgtaattgttcatgcccacagtaatcctgggaatcttagttttttcctatgattgtggtttctcagcttctttacctctcctttgagttaggtccacctcagttttctaaaggtcaaattaaggcccccccaaaaatacagtatgtagctgaattcctttgaaagatcatgataaactcagaagaacaaacatagaaggaatgtcatttttaatctttttaaagagtgtgtgaaaattcactttaactggaattttaacaggcaagccggcatgcatatatgtagggatgtgtgactttcacagttgtcaccatggacttaggcttgattaaaatgctacacatttagagcgttttgtaattccttttttatatttttaagactagattttgagccatgtgatagttttacctcatattaaatatattgtacagaagtaaaaataatcatgtattcactttgaactcctcaaagccttttttatttatttacttatttacttacttggtttaggagcagaggtttaataggcaaaagaaagagaaaagagactagctctcttctgagaagagaggggtgtccaagtgggacttccctcctcagagccttttttttttttttttttttggagacagagttttgctcttgttgctcaggctggagttcagtggcacagtcttggctcactgcaacctctgcctcccgagttcaagcgattcttcttcagcctcccaagtagctgggattacaggcatgcgccaccacgcccagctaattttgtatttttaatagagatggggtttctgcatgttggtcaggctgatctcgaactcctgacaggtgatccacctgcctcggcctcccaaagtgctgggattacaggtgtgagccactgcgcccagcgctcacagccttttagtgaacacttgtatagttttctattgtaggcaaagccattttgtactgcattaattcatgtcattattttgaagacatctcttggtccttttttttttttaattgagatggagtctcgctctgttgcccaggctggagtgcagtggtgagatctcggctcactgcagccgcctccaccttccgggttcaagtgattttcctgcctcagcctcccaagtagctgggactacaggtttgtgccaccacacccagctaatttttgtatttttagtagagatggggtttcaccatgttggccaggatggtcttcatctcttaaccttgtgatctgcctggctcaaccttccaaagtgttgggattacaggcgtggccactacgcctggccctccttgtcctttttatgtcatgtctaagaactcctcaccaggttttctatcgtatttcctcctacaaattttatcttctacattggatctgattcatgttaagttaatttttgtattacagtatgaactttagtttcttttgttgttgcccatgaatttttttaagctccatttcttgaaaagactattctgcctctattgaattgcttttacaccttagcaaaaaattatttaagtatattcatgttggtctatttcttggttctctatgttattccattggtcttcgagcctaaacctatgccaataccactctattttgattactattgctatctactaaattttaaaatagggtaaacttattcctcactctttattctttttaaaaattgatttggggccaggcatggtggctcacgcctgtaatcccaacactttcggaggccaaggtgggcagattacatgaggtcaggagttcaagacctgcctggccaatatgatgaaaactcgtctctatttaaaaaatacaaaacctagccaggcaaggttgcaggcgcctgtagtcccagctactcgggaggctgaggcagaagaattgtttgaacccgggaggtggaagttgcagtgagctgagatggtgccactacactccagcctgggtgacagagtgagaccctgtctcaaaaaataaataaaaaataaaaattgatttggctttcatatcaattgtttcctttggctttgtatatacattttattgcatgtttgtctctatgaaatatgttgctgggattttgatataaattgccttaaatctaaagatcgttttggtgggaattgacatcttgttgagtcttgcagttcatgaatatggtacgtccctctgtttattgaggtcctcgttgatttatttcataagggttttgtaattttcagcttatagattatggacatattttaaaaatctagacagtttcttagagggccattatatgttgtattgagttttaaatttcagtttgcacttgatacttgcaattatagagaaatatataaattagaatttttatatgtattctgtgactttgctgaagtcagtagttccagcaacattttttaatagctttcttaggattttcttcataaatattaatgttattagcaaacatcaaacatcttacttctactttttttttttttttttgacactcttgttctgtcacctaagctggagtacagtggtgcgatcttggctcactgcaacctctgcctctcgggttcaaggaatttttaccctcagcctctcgagtagctgggattactagcacactccactatgcccagctaatatttgtgtattttgtagagatgaggtttcaccatgttgccagacgggtctcaaactcctgagctcaagtgagcctcctgcctcagcctcccaaagtgctggaattataggcatgagccactgctcctggcccaaacatcttatttcacctacccaatctatattacttttatttccttttcttgtgtttattgcactagctagaacttccagtgtgatgttgaatagaaatggtgaaagaggacatacttgcctttttcttgatgtttgggagaaagcattcagtgtagatcgttaaatataatacctgtagacttttatgtacatgttctttagaaagtttcccttctgagttgctgagggcttttattgtgaatgggcatgtaatttgccaaatgcttttcccccttcaattgatatgatcatgtaatttttcttctttagcctgttatgatggatggctttaactgattttagaatgttttgttgtttttttgagaccaagtctcactctttcgccaaggctggagtgcagcagtggagcaatctcagctcactgcaacctccgcctcccaggttcaagcaattctcttgcctcagcctcccaagtagctgggactacaggcgtgcaccaccatgcccagctaatttttgtatttttagtagagatggggtttcaccatgttggccaggctagtctcgaactcccaacctcaagggatccgcccacctcggcctcccaaagtactggaattacaggcatgagctaccatgcctggccgctttttgaatgtaggccagccttgcactcctgggataaaccccaccaggtcatggaatatgattttttttttttttttgagacgaagtctctgtcacccaggctggagtacagtggcacgatctcggctcactgcaacctccacttcccaggttcaagcgattcttctgcttcagcctcccgaatagcttggactactgtcatgtgccaccatgcctggctaattggaatatgatttcttttaattacaacattccatttgctagtattttattgagaaattttgtatctgaaatcatgagtattccatctggccaaatatgtggctggaatttcatcaaaagtggcagaggggttcccagaagggactgtttcaaaaagtcctgagataggacctgttgggattccaaagaaaggagcataaaacaccagggtaatcagttcaaatcattgttcggaggaactttcatacagggttgtgggggctgcagtgtgtccttgtgttggacagcaaacaaaaaaaaaagctctacttgtgtacgtctgcaatgagaagtttgggttatggagagtatatgagggcttaaggaatttggctcagatccagggccagtttctacatgtttagcaacatgtttgatctctcagtgtttcgggcaacaatgtaactgtcagtgcctgggcattccaatccctagcttacgtttaagcctgcaggggaagacatgcacttggtccagggtcacagagctgtcaaggcaccttgcacttctaggccaggacacagaaaggggagttggggaccactacaatgagcaatgttggtcagtagttttatttgtttgttttcactttatctgattttggtgtttgactaatactggcctcccaaaatcaactgggaatttttcctccagtgccaccccctttttatttgcatgacattttgtagaattggtgttgtttctttaagtattcggtagaattttttggtgaaaccatttaagtctggaggtttctcttgtggaaggtttgaattacgtagtcattcaacttaataggtactcaaactatttcatattgggtgggttttgatagattattatttttgaggaattgttccatttcatctaagttttgtaacttaaatttgtggagttatttatttgaagtattcccttattattcccttcatgacagaaggttctatagttgtatcctttgttttattcctaatagtggttatgtgtgtcttctttatctttgttaatcttcttagatgtttataaattttattgactatttcaaagaaccagctttctgtgtcattgattttctatgtgttctgactttgatttctattctgatcattattattttctttttctacttgttttggttgtatattgctgtttgtagattcttgaggtgggagcttagattatcattagagactttattctaacataagcatttagttttataagctaaactcagcactgtttgagctccatcttacattttcctatattgtaattatattttcattcagcttaactatttctcgattccatttaagaaattatctgtgacacatgggttatttagaagtgtgctcttttggccgagcacggtggctcacgcctgtaaccccagcactttgggaggctgaggcgggcagatcatgaggtcaagagatggagaccatcctggccaacatggtgaaaccccatctctactaaaaatacaaaaattagctggcgtggtggcgggctcctgtaatcccaggtactcggaaggctgaggcagaagaatcgcttgaactcgggaggcggagggtgcagtgagctgagatcgcaccactgcactccagcctggcggcagggcaagactctgtctcaaaaaaaaaaagaaaaagaaaagtgtgctctttcatttccaagtatttaaaatactcctgttatcatgttgttatttttagtttcacatttggcctgagcacaagctcgtttaatttcaaaacatttatatttgttgaagtttgttttggggccataaacaaaaagcccataaacaacatgcttgtggagtattccgtaggtacttgtaaaaaggatgtatattctggtgttgtttggtaaaatattctgtgtttatggatcctgttgattaatgatgttattcagactttctatattttcctcattttttgtctaatattttgctaaaagaaggatgttaaagtccccaacagtaattgtggaattttttatttcttctttcagttctatcactttttgcttcatatatttgaatgttctcttgtttggtgtatatgcatttatgattattatatcttcttcatgtattgtccctcttatcattatgaaactttcctctttgtccatgttcattttctgagctctgaagtatactttgtcttacactaatacaaggtataattgctgcatttttaaaagttaatgtttgcatggcttatctttgtccatttcttttattttcaacctgcctacatcattatatttgaagtaaattttatgtagacaacatgtagttgggtcctgctctttttctttttcactttgaaaatctctcttagttggtatattaaaccatttatctttaaggtggctattgatatgttgcactaaatatatcatttttttcctttgcttttcctttttttttttcccccttgagacagagtcttgctctgttgcccaggctccagtacagtggcatgatctcggctcactgcaacctccacttcccgggttcaagcgattctcctacctcagcctcctgagtagctgggattacaggcatgtgccaccacgcctggctaatttttgtatttttttagtagagacggggtttcgccatgttggccgggcaggtctcgaactcctgacctcaggtgatctaccacctcggcctcccaaagtgctgggtttacaggcgtgagccaccatgcctggcctctttttccttttttttctttttttgtttctgtgttggtttggtttttggcatattttattttcttgcctttttttttggatacctgtacaattttaagaattcagttttggtttgtctgtagtgttttttaaatttttaaattttattttaacagcaagctctaacatagtgcttttttaagtgtatttcttggtataattattttagtggttactttatgtattaaaatgtatttatgtaacttaatcacaatctgctggttgtcaacattatagcaatttgagtgatttgtagaaatgttacttttattaggtccctttatactcattattctttttttttttttttttttttgagacggagtctcgctctgtcgccaggctggagtgcagtggtgcagtctcggctcactgcaacctccacctcccagattcaagcgattctcctgcctcagcctttcagtaactgggactacaggcgcttgccaccatgcctagctaatttttgtatttttagtagaaatggggtttcatcacgttggcctgatctcctgacctcgtgatccacccgcctcaacctcccaaagtgctgggattacaggcgtgagccactgcgcccggccccattattcttttaatacaattgtcttgagcatttactctccatgtgctgagcaccatattgaatgatgttataatttctgcttctgttgtcaaacctatttatttaaaatctctagtcctatgtcataatgtcagactttgttgaaaggacaagaatagtctctttgcctgtatttcttaccctttccattgttcttctatcttgaagcctccttctaccattttctttgcatgtggagaacttcctgtagccattttttttagaataagtctacctgtgacaaatattctttgttttcttttatctgagaatatctttatttcttaattcttgaaggaaatttttgtgtggtataggattcatggttgacaagtcttttcttttggaaaacttgaaaaacattgcagcacttccctgtggcctctggttttaaatgagaaatctgcttccatttgaactgttcttcttctttactaatgtgtcatttctctctaactgcttttaaaatgtgtgtctttagttttcagaaatgtgattatgatgtgtcctagtgtggaatttttttatgtttatcctgttgcgtgattgttcggtttttcaagtcttcaggtgtatggcttctgccaaatctgggaaatgtttggcctttatttcttcaaatattttcattcccactcccttccccctttttgcaactcagaaaaactgagtgaggtctttattttaattgttccaaatgtcaggcctctattttaattgtttcaaatgttaggtctctattttacctgttccaaatgtccttgaagcgctcttcttttaagttttgtgaccttgatctgtctttggagagggctgcagggagtggagtgctgacgactctcactgcttgccttgagatggcgctatcctggaagtgaaagtataatgccaactagcattgccttggactgcctccttctgccttgctactggctaggggtgggagtttggctctcctgctgtgcaaagggaaggagcatgtagactttttaaatcaggttgcttaaaagtgggccaaaggggaggtggggcttttaaactggcaacaatcaaatgtcacatatcaaaaatggagtcagaggccaggcacggtggctcacgcctgtaatcccagcactttgggaggccgagcagggaggattgcctcaggccaggagttcaagacaagcgtggccaacatagcgaaaccgtgtctctactaaaaatacaaaaaattagccggtcatggtggcgcatgcctgtaattccagctactcaggaggctgaagcacaagaatcgcttgaaccctggaggcggaggttgcagagagccaagaatgtgccactgcactccagccggggcaacagagtgagactctgtctaaaaaacaacaacaaaaaaaaaaacccataaaacaaaaatggaatcagactgtcatacttttggttggctgaaaaataggaaaaaaaacaaacccagccttatttatagatggattatcttgatgtttggagtaagctaaaaatagattgatacatcacatcctgccttgagtggctgtgatgtggccagggatgtagagaaatcctctccatggcctgaagctggaccagtacaagtgggcgttacctttgtgctgggagaagtgccctgaggtaaagatacatgtgtgcttttgtgggaaatggtttgtctcgttgttcagaagtgctgcagatcagtgacaagtatatatagaacaagggcatgaaattactggagtgggcaaagtgagtggatatttatgtcccacgtcagtgcctataaaaagaaacccactgcagaagaggggaggggaacctagtagttaaggttaaccaggctcagtcctcagccatcccagtccttgcactctagggatataaaatatagtcaccaaggtgttaggggacggagggttttttttgtttgttattgttttttgtttgtttgtttgttttgagacggagtctcactctgtcaccaggctggagtgcagtggcacgatctcagctcactacaacctccacctcccgagttcaagcaattctcctgcctcagcctcctgagtagctgggattataggcgcttgcaaccatgcccagctaatttttgtatttttagtagagacggggtttcaccatgttggccaggatggtctcgatctcttgacctcatgatccacccacctcagcctcccaaaatgctgggattacaggcgtgagccactgcagccagccaggaatggaggttttaaaagggcccaacaacatggcatcctgctgaccacaactaaaatagctccgctccttacctactatttacgaagaccaacactaagacagtatatggtgtaatccctacaagagaacagcctgccccttggtgacatgtttacgtcagacctttttcctcccagacagtgcattgattcttatttaatggcattgctgctttttctggatatgacattaacttccctgccaacagagcctttgctgaaaccattataagggagtgtattgacttcttcatataccaacactggctggtcattaccttaaagatccaatcacaatgtagacacaaatggattagggtttgtagctaacgctgttgatgtcttgttctgtacaacccatcttcctacaagtcttatcaaatgacctctgggaggatgtcagcctgctcactaataaagtttttgttttgttttgttttttgagacagagtctggctctgtcccccaggctgtagggtaggagtgcagtggtgtgatctcggctcactgcagccttcgcctcctgggttcaagtgattctcatgcctcagccttcttagtagctgagattacaggtgtccaccaccacacccggctaatttttgtatttttggtagagacagggtttcaccatgttggccaggctggtctcgaacccttgacctcaattgatccaccctcttcagcctcccaaagtgctgggattacaggtgtgagccactgtgcctggccactaataaagttttattgcgccccctcttccgtctcactgcctcattttcattcctgtgcatcctgagttcatatctcagataaactccctgtactccagtaatcatctcacagtttactgccatagaatatcaaaagtaagaagttctgttttcacattctttctattaatgaacacccaattttcacattctttcccctctcacttctgtagatcgttacttcatactcattttctgaaatgtcttcctctttttgccccattctgtgggactcaaccatgcaaagctctaaacctagattgaacattagtccaacgttttctgagctgacccaggctgtttggaagttctgggaaaaaccttaacccccatttccaccaccccacagacctcttcccatccctcagtgaactaaaatctctggaggatccagtttctcagatgcccagtatttttctggccttgccattgccatttttgggggaaatcacttatccacaccaattaaaggaatgtcagatgaagttttctgttagtcttcctaaattgtggcagccagtgtctccccatgagttgcgtgcaaacccccacatggctctgtacaactttctctttgcaaaattaatatttttagtatataaaatgatatgccagatgtatggttgtctttcctaaatctatacagccatccctatgttttcacttactctaaaggaagttcaaattttgcattgttttcttgcatgttttctttatatatcattccttttttttttttttttggacaggtctaggggaatatctaaggtgtagtcttgaattatctctaagtttaaatattcttctattaatttttttgcctttttttatttttgtggagaatgaggtcttgttatgttgcccaggcaggtcttgaactcctaggctcattctatcctcctgcctctgccctcctaagtgctaggattgcaagcatgagccatcatgttcagtcctattaatttttcttaaaaaagataatgaagtaaactttgcattcagtaatctcctgttaagaatatttttggtgaattttgatgaatacatgattttgtgatcacaaaccaccattaaagctgtgaaatatttccatcacaagaaaatattccttgatatagtcaaactgtctcccaaactccagctataaggcccattcatttaggtttttctctttttgccttttttagaatgtgaagtgaatggaatcatataatatgtggttttcagatattttcacttggcatatgattttgggatttattcattttatttcatattgtttcttatatagagtagtttattttgtggatatgctacaatttgttcatctgttcacctgttcgtgaacaattttccaagtttttggctgtcgtgaataggacgttcatgaatatttgctacagatatttggatggaaacattttaacttgtcttttgtaaataactaagagtagaattggtatatcatatggtatgtttatatttacctatataggaagctgtcaagttgttttccaaaatgactatcattttgcattctcatcaaaaatgtatgagagtccagtgctgcatctttgtcatcacttggtatttattgtcactttgaaacattttactaatttcagcaggtgtgttgcagtattttatttgggttttaagttgcattgctaaaatgactcatgatattgaatatcttttcatgtgttcattgttgatttgtatatctttagttatttgtccaaatcttttttttttttttttttttttgagacagaatcttgctctatctcccaggctagagtgcaatggtgcaatcttagctcactgaaacctctgtctcccaagttcaactgattctcatgcctcggcctcttgagtagctcggattacaggcacgcaccaccacgcccagctggtccaaatcttttttcaatttttaattgcttttttcttcttaacacgaaattacataactttgctttaattttctcctttttaaatgttctatattatagtcatttctcagttatatgttttgcaaattgttttttttttcagtctttgacttgccttttaattttcttagcagtgtttttggaagagtagatgtcttaaattctgatgtaataaaaatattttgtctttatgtttttttgtgtgtgtcctgtctaattagactttgcctactgcaatgttgcaaagctttgacttatgttttcttctaggcattttatatttttagatcttttatgtggtctgagacccttttttttttttttttttaacggaatctcgctctgccacacagactggagtgcaaaatgatacaatcttggctcactgcaacctctgcctcccaggttcaagcgattctcgtacctcagcctcctaagtagctgggactacaggcacatgccactatgcccagctaattttcgtatttttagtagagatggggttttgtcttattggtgaggctggtctccaactcctgacctcaaggtgatccacccacctcggcctcccaaagtgctgggattacaggcgtgagccactgagcccggcctgagttaacgtttatatatgatctgaggtaagggtttcacattaaattaaatgtgttttataacccaacaaatcactctggggacataaccattaggaatgagggctttcttacaccaaaatacatgtacacaaagatttataacaatttcacaataatcaacaactataaataattcaaatgacagtcatctgtaagatatttaagtaaattgtgaaacagtcataaagtggaagaaaacacacagattaaaactgttacttttgtccaacaagatgaatgaattttccaggaaggaatacttgagttggggcttgtggaagccccaacctgtttgtagtttggggttgccatctgcctcacagagcaaagtgaagggtttggatttggggaacacaaaattgtgttctcctatgaaaaacctttctgtaatatagttggccgtggtatttgccaggaatgaaaggtcagggttggagacctcatgagtctgggttttcatttgaggttaagagaaaaggtagtgattataatcagaaaatctagagtgggtgtaattacctccagaactcactactgttagcctgggttttatggtagttatggaagtggattaactactaatgataaaaaatatagtctcctccacctcagaaaatctcgagtggcagtgacacgccaaacacacagtagcaaatacagtagaattttattgatacttttttaaccagacaaacctcataaatggtgattttttaaaaaaacagaataatgttcacatttttgcagcattaactgagagaaggcaaatttgtgcctgagagggaggaaatgttctcttcatttgcagttctaggaattacatgggaaacacatgtaggtagtcttcaagctataaatttaagatttgtttacttaatctataggtttatacatgtatgagaaatgggaaaaaagaataaatgtaatacattaaaaccaatacagtgaatctccacaccctccaatgaaaatatggaacaaaatctcagcatgcccagcatgagtctgccagattgcaaattccatccaacgcttcagaggatgctattatcaagatttcttcatagtttgacactttaaatatgtgtcaataatgatagctattatattatggcctgattttgaaatttatattaatggaatcatgcttgtagagatgttttttcatattaccgggatatatttttctgttatttttaaagatgtttgaaatgaatgtatatctttctaattatcatcctttgttgataacatgtacattaaatgggattgctttaaaattcattgaatctcatgagaatatgtagaaatgacattagttttggtacattgtaaagcaaaacttcaggttgaatatcctatgataatttaaaaccacaaaattatactattaataatagagcttgagcactttaagggaccatagagactcctttaatgtaatggtgagaatacagaggtacagagaagtcaggtgactagccgaagcccacactctaagataaaggccgaccccatctatttttcctaacttgtcagaatactgtaaattatactgcttttaaaagacctatgaaattggtgttggagatgccatcttgcaaataaaatattctcaaattttgattatctttgttttctttatgcatgggttacttagcgttttgtgacttgatatgcaaccacagcttaaaaaatttccagttatcttctatttttgatctgtaccctgattgaattattttatttcattttacacaagtttaaagagatttttaattgtcctagctattctcagttttgtttgtactctgtgctaaaacatgctgcaattggtgtctgttatgttatatggatttatcaggccaaatgtgttcatcatggtatgtgaatccaacagaactgtaccaatgttatgcctgcctttttgatattattactgagataacgaatatcaaagcagactggtttgtttagagatttaaccctttattctcattatactaaaattgttttatgtaatttgaattcatgtttaaaattgtaaagtatgttttcctgttgatattttctcccttatttctatttgtccgatacaaatgtgcatttttttgtgtgtgtttgtgtttaataattacaggtatgtattttctagacctcgatttaatatatttctatgacattataccttagatgtgtaagctatgaactaattattactggatatttttaactcatcaaaaattactgcctacttattcaataatttattccatgttcttttcttgtgatagctaatatatttgggcttaaatgcatcttcttattttgtgcttatcttttcttcagttttgtttcttgtgctttcttttaaaaacatgtatagattattaatattcttaattttccttttagtttggaatgtatatactcattttgttagtctttaagctgaaaattataacacatgtatttaacacatcagggtatagagttattaatacctttaccctcctcttggataatataaggcatgttatcatgtagtggtattgaggcatcgttaattctattgttctactcaacaaggggatattgttcatgttttatacagataatgaataattgtattgatccgcagatgcattccttatatcacgcagatctctcacctggaatcactttttttttgccttaaatataaccttttgggttacctttttaactaaaattttcattttttacctcatatggtcttattttatactgcttcttgaaaaacactattgttgtgaatagaaatctaggtttgcacttatttcttcagtaacttcactgtatccttccactacatccatgagtcactatatactggatgtgagtggagacaatttatattgtgactatagtcttcctgtgctacagaaacaaaatttgatggcggtggtgttttgttttgttttgtttttgtttttgcttttgttttgcttttgagacagagttttgctcttgtcgcccaggctggaatgcaatggcagaatctcggctcactgcaacttccacctcccaggttcaagcgattctcctgcctcagcctcccaagtagctgggattacaggcacccaacaccatgccctgctaatttttgtatttttagtagagacggggtttcaccatgttggccaggctggtcttgaactcctgacctcaagtgatccacccacctcggcctctcaaagtgctgggattacaggcatgagccactgtactcagcggtgatggtggtttttttgtgttttgtttttgtttttggagatggagtttcgttcttattgcccaggctggagtgcaatggtgcgatctccgctcaacgaaacctccgcctcccgggtccaagcaattctcccgcctcagcttcccgactagcttgggttacaggcatatgccaccaggcctggctaattttgtatttctagacacggggtttctccatgttggtcaggctggtcttgaactcccaacctcaggtgatctgcccgcctcggcctcccaaagtgctgggattacaggcgtgagccgccacgcccagctggtgatgttttgatgaggacaggacctgacttatgtctcttagtttcaggcaggaccctctcataatcaagtttgtgattggatctacctgccttgagtgccagaagggagaacgagaggtagagaggcaggtttcggttactgtgaatgaaagatgaataaggaagtgtcctctaaagtcacaaacttgaaacgggatgaattctactctccacttaggtctgagagcaattagtcctgctatttccaaaattagaatcttctttttaaaattttagttttagagacagggtctcgctctgttgctcgggctagagtacagtggcgggatcatagcacatagcagctttgaactcctagactcaagccattctcctgtctcagcctcccgaataactgggactacagtccaaaaatttgaatcttgtggcctgtaataacgagtctcttgagcagcatgcctacctatggttttaggcacactttttctgaactgttgaagaaataacccaaatgtgtgctttcatgtaaaatctttaatcatacctatgaggctagctgctgagttagggtgttattgtattttatgttttgataaatgccaaagatcctgctgaggcttagcctcccacagagtatatttacttcttttcatattttccatgtatctcttttattgattcatatcttgatagcatcatgtgtcttatttcactctatgtgaattgaagatagttttcagtcatctatattgatagttctgtaaatattcagttgtactaaatataagcaccccatatttgtatttattagaccagaattatcaatcttggcatgagaattcactagaactttaacaattttatattgtttctactaattgctgagataatggacataaaaatgctcagcatattcatagatttatgtctttatccttttacaaattgttgctttatgtaatacaagtcagcattatacattacatagagttcaaaatataatttcttggtgatcatttctttctttttttgttttctttctttctttctttctttttttttttgtttttgagatggagtttagctcttgtcgcccaggctggagtgctatggcgtgatctctcggctcactgcaacctccgcctgccgggttcaagcgattctctcacctcagcctcctgagtagctgggactacaggtgcccgccaccacgcccagctaattttgtatttttagtagagacggggtttcaccatgttggccaggctggtcttgaactcctgattcacctgccttgacctgccaaagtgctgggattacaggcatgagccactgcacttggccagtgatcgtttctttaatactgatattttctgatataaattttcattttcatgtgttaattctttgttgtattaaatatatttttcccaaagctgtttcatatagttttctaatattatactctacaagtgtttcttgtacccatactactgttttttgtttttgttctttatgagagacggtcttactgtctctcccaggccggagtgctgtgacaccatcagaactctgtgcagccttggctcaagtcatcatcctggctcagcctcctgagtagctgggattacaggcttgtgccaccacaccctgctattactttttttttttttttttttttttttttggtagagatggggccttgttacgtggctcaggctgatctattaatagaattcctgacctcaagcagttctcttgcttcagcctcccacattgcaggaattataggcatgagcctctgtgcctggccttttggaaatttttaacacatcaaaacttactaagtgctaatttaagaatttattccatactcatttcatgagatagctgatatatttgggtttatatacatcctctggttgtgtgtgtgcttttctttgccttacttattgtgtgtactttattttttgtaatgttttctttacatttacattttctttaaatttgtaagatatatactctgattcagttaatgtttaagctttaaaacagttatttaatacattatagagttaatgtatttgctctcctcaagaaatataagaaacttatatgttagttaatttgcccatatgagtttatatactattgaggatatgcatggtaattccaccattctgtttccagaagtattaatattttattttattttttattttaatttttatttatttatttattttgagatgcagtctcactctgttgcctaggctggagtgcagtggcacagtcttggctcactgcaacctccgcttcccgggttcaagtgattctcctgcctcagccttctgagtagctgggattacaggcgcccaccaccacgcctggctaatttttgtatttttagtagaaacagggtttcaccatgttggacaggctggtctcgaactcctgagctcgtgatccgcctgccttggcctcccaaagtgctgagattacaggcgtgagccaccgcgcccaacagtattaatattttatacagataatgagtggtctcattaatccatagatgcactcctctctcagatcctcatttcttctatcatcacagaccatcacctgggatcactttccttcaaccttaagaaggatcttaaaagtgttattttatgccagttatttttatccattaaatttctcattttgggcttcaaatagtcttatttcagtttttcttagccagtgcatttgtcgtgcatagaaatctgctggcagttatatctgtaactgactccgtatgttattccatgtgttcctgacacctaaatttatattggctttgagtggagacagataatttatattatacatatatataattatgtatgtgtgtatataaactacatgtgtatatatatataaatgctgtgtgtatgtgtgtatatatattttttctcaaagatatgaattatttctatgtcatctcataaaataaaccaggttataaaattttaactacagtgactcttaagtggacagtggagttaaaaattatgaagagcaattagtcttgatagttctgtgttttgaatcatacagcctataagaatgtgtcttctggacgatagacctacctgtagtttatgaaaccctcttgcatgtgatttttttcaattaaatgagtctattgatatattggtgtgcttttgtgcaaaaattataaccattaggggctcccacctgtaatcccagcactttggaagactgaggcagttggatcacctgaggtcaggagttcgagaccagcctgaccaacacggagaaaccccatctctactaaaaatacaaaattagccgggcatggtggcggatgcttgtaatcccagctactcgggaggccgaggcaggagaatcgcttgaacctgggagggagaggttgcagtgagctgagatcgtgccattgcacttaagcctgggcaacaagagtgaaactctgtctcaaaaaaaaattataactattatctatgatgctatttgatgagtgagggaataattgtacttttttctttttttttcaaaatcacactgatcctgaaaaggtggatctttgatttatcttcctaaagcagtgtatgtgagaaccttgtgttgaggaagactgataacagcttgtatgtatttagcacgatgtgccaggcctggtgttaagtactttttacctcacttcccatattcctaatgaggttggttgtagtgtttttcatcttactgatttttttttgtttgtttttgttttgttttgtttttggctaatgactttaaaagacctccagttcttgaacttcagctagggtcccatccccagagtttatcagaaggtataggttgggtccaagaattcacaggttttttaagttcatagtgaagctgatgctgtaaaactacatatcaaattgggaagcaatgaattagaagaggctcatgttttcgtcatgttacatgtaagttcctccttcacttttcgccatgaataaaagttccctgtggcctcaccagaagcagatacgggcaccatgcttcctgtacagccagcagaaaggtagctaattacatctcttttctttatatgttagaaaaattagaaggacattcaatgttttacaaaaaggcccacaaacgaaatacagacaacgttcaatttattaatacgtttcaatccccaaatctgagagaggtgaagcaggtttcccagggcctcagaagcaggattgaagaatgggtcccttgctggcgacttcagtggcgtggcattgtcccaggtggccatggaaatcagggtgcataccctttaaaagcagctgtggcctccgagatatcgttttcccagtcttttctccccctccctgcacgacgcctcttggcagacatccgggagaacccgaaaggcgctcgttgcctggttggatgcagggtacaaactacgttacccagaaatctgtgcccagctcattgttagccggcgtgcagccaatgacagcccagaaactgggcgtttcctgctgctctgggctgcaggggcgagacttctggcgtcgccgtcgtgacgtatttttcctatgcccggtccgtgcattctggttgtgaaggctgagttctagagatcgggtcggctttctacgcggctctcgtggaacctagcaaagaaagacagtgaagactgcaggaccttccttcgcgcttttgttacaatccatgacccctgtcgtgggacgggcggcctctcgcggaggtgtctgccggggctgggctcttaccgaggcctccacacacgtcctcttgtccttgtctcccccagaagcagccgccttagtcttgtgagcgtttttacaccgggtagattgagacttggagtgctacactcagcccgagggcgtccagcgcggtggaggcgtggggtttcggctgagcccacagggcacagactgttcatccgcttctcatggcagcggcggtgctgatggaccgggttcaggtgagtgggggcatccctcaagcgcaccccggcctggttggtgtgtcctgggatgttcgctctcatcgcgcacttcagggtgctcactccgtcgcattatgtggaggggttccgctcccctcatcagtggcataaggtgtggaacggactcgaaggcgcaggggcagttcgtacaaatgcatgcatggagaggagaatgagtttggggagttccgggaactctctgtgcctggtgagaacagggactagggggtcagaggtaggcctggaatggccgcccgaggagctggtcctctcttctgagggtgctgggagtcatgcaaggtttggtacagagaagggaggtcctctgacgcagttcttaaaaggctccctctggctgcagagtgggtagactagggattatagggtagacggggagatcaagatgaagtctactgaaatagtccaggtgagcgttgatggtctgggccagagtggtggcagcagaggttagagaatgtatgggttttgggttttgtatgtattttataaggaaggctgaccagattctctgatgagacatagtgatgatatcctgggattcttcacatgactgtcttcacttgagacagggggcagtgaatggaggtcatttctagtttagtgtcctgaatccaggccatgagttgtatggagttatgtggagaagtccccacctggcgaccaatgggatgagtactgcaaaagtatatcagacctaggaacaggtacgctcaaatgcttgtaggattgagtttggagcgctcagggaatctcaggtcttaattacctttgttggaaacaggtatcagaggaaggagttaggcaggaatggctggccgaggtgtcttgagtgtggtaaaagtcgtgggagatttggagcagaggagggagatgatctgactcagattttaacatgctctctctggctttcaggttgagaacagactgtgagcatgagggagcagctactgcagtagtgttgatggtgtctggtctagaggtgtggctgtggaggtgagagaagttggtaaattttctgttttttaaagtagggtgattggattttttgatgcgaaaggtgaaagagaggagagtcgtggatgaccctaaggttggtttgtttttgctgtagctggtaaaattatgaaaatgccatcaactgagatagagaagttggcagcaggtatgatttttagtggttatatcaggagttaggctttggtcatgtttaggttaagaggtctcagttgtcatcttagttgaggcctcaggaaaacacacaggtttttagttctggggaagggttctgttgaagaagttgaaaaaaatggtggccagtgtgtggagtgggatggggtatcttcaaatcatggtggtaatgctgttattcagtaagaaagttgaaactggacactgagagaaaactgggtctgttgcttaggcacctggacggcagtggtggatagtgtgaagacgcgagcgcttcctggacactgcttgcagagtggcatgggggatgagggatgtcatggaggtgcatatggcatgggccagtggcggtggggatctcagatgtgaggaaggtgtagtccaaagagtaatgagcacgttgggaggagtgtgaactgatgcccttaagactctagtattggcagctcatgggagaagatggagctgaagtttggttgtgtttagaggcatcgtctggacaacaccaggagaactggttggtaggcgagtatttgggacccttcatgccagacccagagttgagacagcatctgtctgcacacttgcctggttctgctctgggctggacacagtggtgagagggacatgaggagagagcagacactagtggtgccaaggtctgttatctcctcttagttgggaggctggggaggcgagggactagagagtgggtgtgtgagtgtgtagactggggaggagggggttctggggagagatgctgactgtggactcagctgtacttatcatggcagagttgtgtgaccttcgaggatgtgttcgtgtacttctctcgggaggagtgggaactccttgaggaggcacagagattcctgtaccgtgatgtgatgctggagaactttgcacttgtggctacactaggtaagtctgtgttttagttatctaatgctacatggcaaattatcccaaagcttagtaactgcaaacaataaaaatcaattatctctccagtttcagtgcattggtaatctggttagagcattttttgttgtttattattttgagggttttttttttgttttttgttttttgttttttcagagagtcttactctgtcacccaggctacagtgcagtgttgtgatcatggttcactgcagcctcaaattcttgggctcaagtgatcccccccacctcaccctcctgagtagctgggactataggtgcatgccaccacgcccggctattttactttttgtagagataaggtcttgctacgttgcccaggctggtctagagctcctgacctcaagcgatccttcctccttggcctcccaaagtgctgggattacaggcttgagccagtgtgcccagcctgatcacaccttcttatgcaggtgcttttggctctcatgaagttttaatcaagctctcagccagtgttgtggtcttacctgagaagaatccacttacaagctcactcacattgctttttgcaagatttagtttcttgtggcttgttggactgtgagcactgttccttgctggctgttggccaaagtcctccctcaggtggcctgtctgtattgtaccttatgacacagaagctaacttctctttgagcaagtgaccaaaagaatgttcaagatggaagcccaggattgtaacctaatcttgaaagtgtcatttcattatttttgccatattctattccttggaaataagtaagtccatccagcttacaatcaagtgaggaggcttacacaggggcaagagtaccaagaggtagggatcactgggaccatctcagaggctgtgttccacaggcctttacacccactccggtgtccttggtggggtttgagtcttcttctcttccccatgggccactctttctgtccatccagatccatgactcttctccttcccttctttgtttcccagagtaggtgctgtgggttctagggctggctgtgttcagtgtttctgccttcactgggtaatctgaacatctgttgccctagagctttgcaggaaaaggttaggattcgggagtttttcagtctgctaagcagattctacacagctcaggtgcccactgcctgagtccgtgtcatgatctttgcacctctttgtcctagattctgccctcatcctctggctgacatttcctggggcctgactgtgccaggaatttcaggggctgacacagtcacttcttgtggtgattacagggctgtcctggtacatccgccttggagagtattttttctaaacattctattttctctgtggagtgggtctacctgcgccactcacctgccctttgtttgcgttacagctttcattttcccagtcccatgcagttgcgcagttggagggggcagaaaaccttgggtgcctgacagggcagacatcactgcagccacagtaaaggagacctacagagggcatggccctgctgaatgggagctggaagagggtatctgttatggttgggttcaaatcgaaccttcaacttgttttgtgtttgtcagtgttttgttgccaaggcccatagtgattcttcacatctactttactttcctcattcttggcactttttccatttgtcatttctcacgtgtcttccatcctttgggtgttttcccacttttctggcctccgtgtttcaattgctctcttcaacactagcttactttaatgtgtcatgagttctgcacattaaatagtccgtgagaatgagctacttatttggagtcagattttcgtgggcatggacatacccatctgcacagagctcacctgacaccagcggccaaggccctgctgaaactctcttgcagaggaatcaggtagaggcttcacctatactccctatactctatgccattgtttttaggtctttacctcatagtcagggttcctccattctgtgaggccctatactgacaaccagcccttctttacactgatcctggccctcttgtcctgccaacaagccagtggactcgcactggtgttagacacacatttgtgatggggctgctgcctcccaccaaagtcagcatgcacttcaccagctcttttttgctttcaggtttttggtgtgaagcagaacatgaggcaccttctgagcagagcgtttctgtagaaggagtgtcacaggtcaggactgctgagtcaggtcttttccagaaagcacacccatgtgagatgtgtgacccactcttgaaagacattttgcacctggctgaacaccagggatcacaccttacacagaaactgtgcacacgtgggctgtgtaggagaagattctcgttcagtgcaaacttttaccagcaccagaagcaacataatggagagaattgcttcagaggggatgatggaggggcctcatttgtgaagagctgtacagtccacatgttagggagatcctttacgtgcagggaggaagggatggacttaccagatagctctggccttttccagcaccagaccacttacaatagggtgagtccatgcagaaggactgaatgcatggagtctttcccacacagctccagtctcaggcaacaccaaggagactatgatggacagatgcttttcagttgcggtgatgaagggaaagccttcctggacacctttactcttcttgacagccagatgactcatgctgaggtgagacccttcagatgcctaccatgtggaaatgtgttcaaggagaaatcagctcttattaatcacagaaaaatccacagtggagaaatatctcatgtgtgtaaggagtgtggaaaagccttcattcacttgcaccacctaaaaatgcaccagaaatttcacactggaaaaagacactatacatgcagtgaatgtgggaaggccttcagccgcaaggacacacttgttcagcatcagagagttcacactggagaaagatcttatgactgcagtgaatgtggaaaagcctacagcagaagctcccaccttgttcagcaccagagaattcacacaggagaaaggccttataagtgcaacaaatgtgggaaagcctttagccgtaaagacacacttgttcagcaccagagatttcatactggagaaaggccttatgagtgcagtgaatgtggaaaattctttagccaaagctcccaccttattgagcactggagaattcataccggggcaaggccctatgaatgcatagaatgtggaaaattctttagccataactctagcctcattaaacatcggagagtccacacaggagcaagatcctacgtgtgcagcaaatgtgggaaggcctttggctgcaaagacacacttgttcagcaccagataattcacactggagcaaggccttatgagtgcagtgaatgtgggaaggccttcagccgtaaagacacacttgtgcaacaccaaaaaatccacactggagaaaggccttatgagtgtggtgaatgtggtaaattcttcagccatagctccaaccttattgtacaccagagaattcacactggagcaaagccttatgagtgcaatgaatgtgggaaatgctttagccacaactccagcctcattttgcaccagagagttcacacaggagcaaggccttatgtgtgcagtgaatgtgggaaggcttacattagtagctcccaccttgttcaacacaagaaagttcacactggagcaagaccttatgagtgcagtgaatgtgggaaattctttagccgcaactctggcctcattctgcaccagagggttcacactggagaaaagccttacgtatgcagcgaatgtgggaaagcctatagcagaagctcccatcttgttcgtcaccagaaagctcacactggagaaagagctcacgagtgcaacagttttggtggccctttagctgcatctcttaaacttgtttaacaccagaaaattcacacaagagaaaggccttatgaatgcagaaaatatgtcatcttgttcatcctcataggactcacaccagagcaatgctctgtgagtaccctttgtgagggaaccatcagctagcagatgagcaccgtatattcattccaccctggggagattcctgataagcaccacatatgtgggaggctttcatgaggtgtgttgcactttgtaactgtctagagctcttgatggaattatatcactgccagtgcctgtggcggaagccatcttattgctaccagctgtgtgtgtcaatcactccattttgctcagggaaggcagacttctgtgctttctttcctgttccctacaggtaatcatgaatattttcaaggacttccccccccccccacttcaccccctaccattgagggtcctcatcttttccctcatgattaggttctgagcaaacatgatctagctctcaccaaaaggacctgagctagggtctgctgggatttcctgacacgattttccatcttcatggacaatgttaactgtaaacgtgatagctgtgacttacttgtcttactgccaaatcgcccaaatttggaactgcttgtcccatgctgctctgatttatacagtgataagggcctattgtggcagtctttactcttggggattttgttactgtgtagagtggattgagaaaagaattgggttctgtcatgaagggagtagcaccttttgtgggcaccacctttatgtgcctcagaggggaccaaaggatggcagaaaactgttctcagtctagtttgacctaatttacactattgccctaggcttgctaggaaagactgaaaaaatttttgtgcctaactttgtggcctggctgccaggatttcctgtgagcccagtgaggagggcatagttggtgcgaaaatctcctgtgcttgtggaagcaacataagttgggtcccttaactgtcacgtactccccagcactgttgagggattgctgtcttctgtacctgtacaggatcaagtccctgatatccagaaccccataggcaagtaacattgactgtaagacctctgtagggcaatgtgaaaatcatgattgctacagaagcactgagataatggagtggggatgactgtggcaaacaaaaggagattcgaacattctagaggggcatccacaagtctcggtgcagttatgatggtgtgggatgggagtgcatagaaattctcaggaccttcagacatctgtatctcctgtggccaaggccactgtcagaggaaataatctaaatgtttgtggattcctgtgtctccctgggcagttgacctgcacagacaggaacctcagcagtgacagaagagagatccagggatgggtcttctctgacccagccagcattccgagtgactgaggtggatgtggacatcattgcttaccaatttttaccaacattgaggcagggctcactctcctaaattgtagggagaggaatatggtaaagccaaaatagttgacagatctaactttcctagtggaacagtatatatagattttaatgaggaacatttatttaatagctttatggaggtatgattaacatgcaataaactgcaaatatgtaaagtgtaaaatgtgctgtttcagcatgtgtgtacacctatgaaaccaccacagtcaagatatccaacacaacaaaagattgtccctttataatcctcaatttttccttatcttgttttccacaattcacaagcaacagcaagcattttctataattttataaatgaaaccatatggtgtgtactttttagggggtggggctctggctttttcagtaaacataactattttaaggttaatccattatcttgttgcatgaatcaattgtttgctcatttgtattgctgcgtagtatttcagtatttcattgtataccacaatttttcttctttgtcaacttaattgttatggatgtttgggtaactttcagtttttggctattacaaataaacctctgaagatttgtgtgcaaattatggctgaatgatattccattctataaatacacctcagtttctttatccatttacttattgaaggacggttgctttcaagttttggcagttatgaataaacctactacatatttgtatagtttttctgtggagatgttttcaactcatttggatatgtgccaaggagtgcaattttctctgtcatatagcatgtttagtcttgtaagaaactgccaagctgtcttccaaagcggctgcaccatttattttatttatatatattttttgagacagagtctccactctgtcacccaggctggagtgcagtggtatgatcttggttcactgcaacctccacctattttagtagacatgggtttttaccatgttggccaggctggtctcaaactcctgacctcaagtgatcaccctcctcggcctcccaaagtgctgggataacgggggtgagccactgcaacgggctgtggctgtaccatttttgcatccaactaacaatgattgaacattcctcttgcatctcatcctaatcagcatttggcattttcagtattttggattttaaaatgccattcaaataggtgtgtagtggtatgccattgttgcttttatttgcaattccctaataacacacaataagtatcttttttaaaggcagggttgttttgttttgttttgaaatggagtcttgctctgttgcccaggctggagtacagtggcatgatttcggctcactgcaacctccacctcccgggttcaagcgattctcccaccttagccttccaagcagctgggactacaggcacccgccaccatgcccagctaatttttgtatttttagcagaaatggggtttcgccatgttggccaggctggtctcgaactcctgacctcaggtgatctgtctgcctcggcctcccaaggtgctgggattacaggtgtgagtcactgcgcccagcctggctggggtttttttatgtgagtttcacacacctctgagtaagtggcttgcagacagagaagttaacaactttggctgttagcttgaacctgtgatttatgaataccaaaaagacaaatacagaatctaaggaaacacataacagtcctgtatacacacagcagctggcagccctattcccggtgtgtcccatatacctaccattgacctgaaacccagtttgtacgtgctcattgaacattttgtagagcagtaaatacacatcatcacacagattgcctactcatttttatttttatttttcgagacggagtcttgcactgtcacccaggctggagtgcagtggcgcgatctctgctcactgcaacttccacctcctgggttcaagcgattctcctgcctcagcctcccaagtagcttggattacaggcacccgccaccatgcccagataatttttgtatttttagtagagacagggtttcactatgttggccaggctggtcttgagctcctgacctcgtgatccgcccacctcggcctcccaaattgctgggattgcaggcgtgagccaccgcacccggccttcatttttattttttgacaagtgtttccatttgttatctctatccctccaaacagttaataagcgatgttttcaagtatgaaataagaaatacatataggagacagaagcataatgtgtccaggttccagcacagccagtctcaacttcattctttgacttctcagactcttgctcaaactctactgtaaccttgctttttccccccttcacatgtcacagagagatttctgtaggactatttctgccactagttttgaaataacataatcactgttagtccaaactgcaccatcctgtaagccccctgccatctcacagaccttggtcagagtgaagcattccacggagtgagggccttgagaaacatcctgcccaactgcctgactttcttatcacatcgttctgggaaaagatccaaggaaggtcactatcacatcctgccggataaaaggccaaactgcctcaggaacatcttacgcacatcctttggccgggtgctgtggctcacgcctgtaatcccagcaatttgggaggccgaggcgggcggatcacctgaggtcaggaattccagactggcctgaccaacatggtgaaaccctgtccctactaaaaatacaaaaaaattagccgggcgtggtggcacgcgcctgtaaagccaactactcgggaggcggagttcaagaatcgcttgaactccgggaggcggaggttgcagtgggccgagatcacgccattgcactcaaggctgggcgacaagagcgagactcctccaaaaacaaaaaaaaacccaccatcctcctgggcagcaagtcataccctcccgccgcgccccctgccccccacccctgacccctctcatccaggcctataattgccccagcctgtaagcagtgaggggttctggcactaagctagttctccccatcacaggtctcgtgctggacataaaacctgcattgctgtagagctgccaactctgcctttctttaaccctcgccttcccttcaaaacctaacagttattattaatagatttctgtaattttcatttcacaagtattttcacagataatttcaactccctgtaaaatgataactcacttctcaggaaggagataagatcatgaaagttcacagtttttattggggataatacgttccctgtgtacatatactccaactatggaatggcacaaaatgtcctgtcaggaaatggcatgtatcagtcactctcattttcagacaggattgagacttttaaaataaatgtaaaatatttcagacatgaagtaataagtattattagaataaaagcattgcactcttggtaggaacacaatcactgactctacagacagtaatgatgttttcttctggatccagaggcacagcgtcaccctttcaatctacgtcggtatctcctgtcttcttttgtgcaaattcccagccatgtagtctttctttgttctcttggaccaaccatattgaagcttaataaatagaagtcaaagtttaactgtatgtgtatttgaaaagcaacatatggctgagaggcatgagtagagacagagtgcctttgtggtatagtgtgtccctttggcggtgtagccgttgagaacttgctgtgcttcacaatccgatatcataggtccctcacatttctgtgagtatcctagaccttacttcaagaaaatctggttatgtcgcctttaagagcaacccaagccccgtcctgtccgtggagtccggcactctgtttaccagctcccctgacggtgccactgagcctctatccgccatataaggactgaccaacgctctaaggcaagtccagaagcggtgtcgaaacttcataacccagaagacactgcggttctcggcagcgcgactgacccaatgaatgtgcaggaaggaacctttgcgtgcgtgcgtgcgtgcgtgcgtccgtcctcgtgctcgcgcatcgtaggagggcgggacttccggcgtcctcttgccgtggttgatttgattttctctggtgttttcactagttccggcctttggcgctctatgacgtcaccgaagtgacggagcggaaaagcgcgagaagcggcttggttccttgtacgcagaggcggtagtgacacaggcacaactgacagtggcagaagctcagctgacaaggactggggacggcggtgtccttgtcttgcctttgtcgcccccgcccctctcttccctggctggacttgcggagtccccgccgaagaacccgaggtgggtgccccgtcccaggcccccccccacctccgcccgacccctccttccagtgctgaagcccatagaaggggccctgcaggtcaggccccttgtctcgaagagaggggcgttcctgtgtggggtccccgtatcagctggtttgatgcagcctcagagctcccttcggggatctcaggttcagagcatggaggtgctgccaagtgggccgcgtcggggagcccggagtgtgggttgtttctgcgggaaagagagggttttgtgaattttctcttggaatggcagcctgagcagccggtataaccatggaaggttgtcaagggaagaccagtgggaggggcaggtccagagttagaacgagcaggatggggaattgacacagagagacccagaagaggccactgcagtggatcccagaggctgcaccagagccgtggtataagagggacaatgtgatgggattctggatagacctggaagatagagccaacaggttttcctgccgtatcagatatgtctgtgagcaaaaatagggagtgaagggtcatttttttttttttgcccgaacatctgaaagaatgaagttggggaagtcagcagcatgagaagtaggtttcatggagaagatcatgggttggagtttggccagtgtgattctcaggcgtctcaagttgaaaatgtcacatgggtagggggacagaaaggtgtggagtctacagaggagaactggtgtagattcttcaaaagaatagagggtggccgggcgtggtggctcacgccggtaatcccagcactttgggaggccaaggcgagcggatcacaaggtcaggcgttcaagaccagcctgaccaacatggtgaaaccccgtctttagtaaaaatacaaaaattagccgggggtggtgacgcgcgcctgtaatcccagctattcgggaggctgaggcaggagaattgcctgaacccaggaggtggagattgcagtgagccaagatcgcgccattgcactccagcctgggcgacagagcgagattccgtgtcaaaaaaaggtgcggagcgcgggtctcttccgcggaaactgacattgcgtttccgttgtcggcctcccgctgcaggagccatatattgaagaccatgtctggaagcttctactttgtaattgttggtcaccatgataatccagtttttgaaatggagtttttgccagctgggaaggcagaatccaaagacgaccatcgtcatctgaaccagttcatagctcatgctgctctcgacctcgtagatgagaacatgtggctgtcgaacaacatgtacttgaaaactgtggacaagttcaacgagtggtttgtgtcagcatttgtcaccgcggggcatatgaggtttattatgcttcatgacataagacaagaagatggaataaagaacttctttactgatgtttatgatttatatataaaattttcaatgaatccattttatgaacccaattctcctattcgatcaagtgcatttgacagaaaagttcagtttcttgggaagaaacaccttttaagctgaatggagaaaattccaaaataaattatatcaccacaatggtgtatactcaggaatgtgtacattgtaaattacttgattaaatagcctggaaatcttttgtgtattctcagcttatctaaacttaatgaaatttcttttatatttaaaaatagtacattctgtctcatgtcacatatcagtagatcaattagtatttccttgtgaacaatgttatttataaagaactcattatcaataataattaatttctttcttttttttttttttttgagacggagttttgctcttgttgcccaggctggagtgcagtggcacagtctcgtctcactgcaccctccgcctcccaggttcaagcaattctgcctcagcctcccgagtagctgggattacaggctcccaccaccatgcctgcctaattttttttgtatttttagtagagacggagtttcgccatgttggtcaggctggtcttgaactcctgacctcgtgatctgcctgcctcggcctcccaaagtgctgggattacaggcatgagccaccactcccggccatgaaatatttttacttaaaaattgggaataagctttctttttctttctttctttcttttttttttttcttttgagatggagtctggctcctgttgtgcaggggctggagtgcagtggcacgatcttggctcactgcaacctccacctcccgggttcaagcaattctccttcttcagcctcccaagtagctaggattacaggcatgcaccaccacgcctggctaatttttgtatttttagtaaagacgggatttcaccatattggtcaggctggtcttgaactcctgacctcgtgatccgctcgcctcggcctcccaaagtgctgggattacaggtgtgagccactgcgcctggccatgaaatattttttacttaaaaattgggaataagcttttttgtgtgtgtgtgtatgtttttgtttttttgtttttgagatggagtcttgctcctgtcatgcaggctggagtgcagtggcacgatcttggctcactgcagcctctgcctcccgggttcaagcagttctccttccgcctccagagtagctgggattacaggcatacgcctggctaatttttgtatttttagtagagacagggtttcgccattttggccaggctggtcttgaactcctgacctcaggttatctgcctgcctcggcctcccggagtgctgggattacaggtgtgagccactgcgcctggctgggaataagctttcgacttgcccaattcagataaattgttttttttttttttttttttgacgtggagttttgctctgtcgtccaggctggagtgcagtggcgcttggctcactgcaacctctgcctcctgacttcaagcgattctcctgcctcagcctcccaaagtgctgggattacaggtgtgagccaccatacccggcccagataggttgatcttataacaatccagaaacaaatgtcatagtcaagatttggtagatagatttaaaactaaaatattctgccattggaagtgaaatgtcatagcacatacgtggacgttatgcatttagagatgttataaaaatgtattggcagtatacatagcactactcaagaagccaaagaaacacttgtgcagtgctaagtgtcacatgtctgcttctgccagaggctaggaatagtgatcttgctataatgtgagaacctgaatcatgtttgtaaaataggaggctgggagcagttccaggccacagtgaagtgtgttgcttctgtcactttatattcttatatttcctttccctcagacaatcaactgttgatgcctgtacttgtgaaaagttgtaaggcaatttttagggttgttgtcaaagaaaagcttggattacattaacatttgtactcagccttttaggcaatacaccagagggggctgggaattgtctgtttgttcctatgataagtagatcttactgtaaaatagtaaatgtccattgaaaagcaagtaacacaacctgtgctaactgggagcacttgaacaattttgttccattctgaataacttttcagcaagtaattctaagctttgtcttatatccttgtgtaaaattgctaccttcatttttaccctatttgatttcttaaatggtttgttcaagaaaaaaaaaaaaaaaaaaaagaatagagggtgtagattggaccgggtcctgaggatccaatttggtagggaagtctaaaggtcattgcctgcaagctatgtggtgagggaggagagagctgatacttggggttcacaccataggtggagccataagccagatgcttactttagaaaggcgcagacctgccataggaaggattttgtcctctgcctagaaaaagggaggcgtgggtgggataaggaatgggcttgggatggagactaaggtttgagatggtttatattctgcacctacaggcttggctgaccctcagggccactctttgtgggaaaagaaaaaagttatccaggctagtggagcagctgggttctaaactagggcactgctttttccccttctccacatatcaaggcaagattggatgatctactgccccagtcaaggtctgccagcaagctcccctcagagccttatgtaacaggcaggcctggttgcagaggaccagtagctgacctacctgctcagcccttccctacaactcattaagaatatatgaaacacttattggtataagcactaaccagtgtccttctaaatgtgtacacataggcagttagaagtgaagctattcattgagttaaattcctgcaaacactacataattgatttgacccaaatttgcctataattatcaacataccatggaaaattttagtatcctctaaaattttaaaagctaaaaatatacacctcagtttttgaaattctactacatcatttatactgaaaacatatagtaaaccattaatccaagaacagtaatagctgatatatatgatgagcaacgagtgtttgacaccggtaagagtcctatgaggtgggagccattcttacaacctatttacagatgagagcactgaagctccagcaggttcagttcttttctagagtcacagtgctgctaagagccaacagtgaagtcggaggagctgagtttatacaatcaacttgagatcagtttgctttagggtaaggaagaagagatggtggtccaactctgcctgtaagatcttcccatcgttgcccatttctcacggtttccctcttccttcagggtcccctggcgatggcagaaatgaaccctgcacaggtgagtggagtgttttctacctttcacctaccagttatctcatagatggttttggcacctccatgtaaagaaaagtggtgtccagagactctctttctgtctttctccctctcttatgtctgaaaagtgagtgattccaccagttctagtatcttaaattaggtctgggatttttgtttgattgttttaagtttactgtgacaccttacctggatggccctggattatgtggagtggctcccatttttgacagttgacgtggtaacatctgtcagagtgtcatgggcacaagattaagaatgtttcagtgtttagaggagagactgaactggatttttagggaactgcaagtgtctgttatatcggataggaatagggagcagagtgggaggtggctagagacacacaaacatcaggcctggaatgacagcctaggtcctgggtctctaatctaagggaggtggtagatggggaagatttgaagcagaagagggcagtgataggaccctagcttaaggaactttctttggcgtctgagtggaggacagactgtggaggtgagggtaatggcagggagatctgagaggatgttcctgcagcagtctaggtggatgttggtggtgacttgtcaagagtagcggtggcttcaggatgtgttttgaactggagctgcccacattttatgatgtagagagtgaggcagctgggggggtgggatagaaggggaatcaggagtggccccatggtttttgtttggaagcatagatgctccatcagctaagatgggagaagtcagcagtattaggaattttcagagtgagtgtgaggagtcagtgtttgttcaagccacagatgtctcagagactcctggtggaggagttcaggttggagacgtccacactatggtggctgtcgtatggaccaggatgaagccatggattcagtttaggtgacagcatctctaggttatggtggcagtgctgttcgaagacagagaattggaatggggcatgagaactgggtctcttactgggtagctgtgcagtggtggaggagtcactagacaaatgagggaatggagtgtttgtggggatgagtgtatgtgagatggtggggtataggagtgagaaagacttctgaaggagagtggacatgatggggttgctgaggagggtaatagggtgaggtcggagagttgctaagcatcagttggaatgagatgaggatgggaattctattagtctgttttcatattgctacaaagaactacctgagactgggtactttatgaagaaaagaagtttaattgactcacagttcttttttttttttttttttttttttgagatgtggcccaggctggagtgcagtggcacaatctcggctcactgcaatctctccctgccaggttcaagcgattcttctgcctcagcctcctgaatagctgggacgacagactcaccccactacgcccagctaatttttgtatttttagtagagatgggctttcaccatgttggccaggatggtcttgatctcctgacctcgtgatccatcctcctcagcctcccaaagtgttgggattacaggcgtgagccaccgcacccagcccatagttcttcaggcttaacaggaagcataactcggaggcctcaggaaacttacaatcctgtgtccatgaggcaggacacagctgagagtatgtgaagtcctcacatggtttgggcacctgacagtgaagtgagaaacagggccatgtagggaaccttcaacccagggcttagggctgcccccggtgctagggaactttggtgttctggggcaggactgggagtgaattggatgctgagcgtatttgccgtgcaccacctggtttctgtgtgcagagtggcctgttaggaggtgaaggaaatgcctgtggtgtgggctgggaggtgtctgtggaattgactggagtggaggtgtgagagatgggattggagtgctgtccaaagagtgatgtgcaggcaggaggagtgtgaatggagggcctcaggccctggccctggtagctcaagggaggaggatgagtctgagtttggttgtcttgggaggcaagatctgggtgactccatggaaactggctggcaggagaggatggatccccccacgggaggcccacattccttttctaccttatcttccatctgtttcctctgtgtgctggacacggtggccaatgtcaatatggagagaaaagtcactcatgccacctggatgtggtttctcttccacattgggagggtgtagagattgaggaaggaaaggaggtgtaggggagagggatgagttcctggagagagaaaagtagcagtgattgtacccattggggttttttgtttttttttttttagatggagtcttgctgtgttgtcacccaggctggagtgcagtggcatgatcttggctcactgcaacctgcacctcctggattcaagcagttctgcctcaatctcccaagtagctaggactacaggcatgtgccgccatgcccacctaatttttgtatttttagtagagatgggatttcactgtgttggccaggctggtcttgaactcctgacctcaggtgatctgcccgcctcagcctcccaaagtgctgggattataggcatgagccactgtgcctggcccccatggagttttaatttatggatgtgagtgagtgatgccagggacaggccaatgacactgaaagaagatatttattccttacgtttccctaaggaggttacataccacataacacagggccacacggtgaaacaccagatttgatcaggaggaaaattggagtgagtttagtttagtccacagatgctgttggggtttccaagggaaacaaggcagggctggctgtcaggatagtttggctagttttagtaattccaggacacctgggctattgggactgtccctagttgtgcagtacctgtccctgggttgatttagagcatgggaaatactgacttggtttgagaaagttagagatggagatggttaagaatatgtgcccaggatggtaggggagatggaaacacatttagctgttagtttgtccctgtgtttaatgggtggtaaatataagtagaaaataaatagagaacttaagtaaatacagtttgaaaagctgctcatgtattcatctttcccaatttggcagggtcatgtggtttttgaagacgtggccatatatttctcccaggaggagtgggggcatctcgatgaggctcagagattgctgtaccgtgatgtgatgctggagaatttggcccttttgtcctcactaggtaaggccctcacacttgcccagtgtcctgggttgggctgtgttgtctccttttacctgaaggcagctctgcgtttcccacagtgagaccatgggtgctgcttcttttccttgtttcctgacatatgttccatgagagtcaggactgcaatatgtgctgtgtgcttcctttttcctggcagccccatcctctgctgttctgaggcttgcaagaaagggctcaggatccagaaatgttgaaggtgacatagagacccactggccctgtgttctattcaaatgcatgagacctctgtgctctgttgttcccttgctcttgccaatatttcttggtcccttcttgttcctggaatttctggcactgacctgatcactaatttggtgaaccactggcttgattgtgtaggatgtagaaatcttctgtgaagttctggtgattatcgaatgtgagatatcatcaggtgatctctctgggaatgtgctgtcttgtctctttctgtgtctttcccctaggactggtctctttcaggtctcacagactgtcaccttaagcaatggggagggccctggtacccaagagggtggatattactccctgaagggctgtagagactcagagggacatgatcctggttcctgggagttgggaaaaggtgtaatatcacagctggggtcatattactaggaatctgtctggtgacccctgttgtttagttgaagactggttgccacaactcactcttcttttccttcccccgttgtcatttttactctgacttctaatccctggcttccagccgttacctattttcttcaactgctccctctgcagtgccatccactgcatgacctgtacttaaggtgaggtctgcatgtatttgtcagtagtccctgaacaccatctcctctgtcacaatcagatctctctgggtttagacacagccttctacacactgctcactagtcaccagcagccatggcctgtggaaagccatttgcagagaagtgacttggagaccctcctcctctctgcactgtacccctctcttgtgttcttacccatcatcagggctctcccattatgggtatttgccaggtccaactctgcacagcaggccttcttctcattggccttagtgtttgtattacttcattctcactctgctattaggaaatacccaagactgggtaatttctaaaggaaagaggttaattgactcacaggtccccattgctggggaggcctcaggaaacttacagtcatggcggaaggcaaaggagaactaggcatcttcttcacagggcggcaagacaaatgagtccaagcagggaaaatgccagacacataaaaccagcaaatttcatgagaatttactcagtttcatgagaacggcatgggggaaactgttcccatgattcagttctgtccacctggtcccacccttgacacgtggggattatggggattacaattcaagatgagatttgggtggggacagagagcctaaccatattattccaccccggccccccccacccaattttatgtcccttccacatttcaacaccaatcatgccttcctaacagtcctccaaactcttaattcactctagcattaacccaaaagtccaagtccaaagtctcatctgagatgaggcaagtcccttctgcctatgagcctgtaaaatcaaaagcaagttagttacttctaagatataatggggatagaggcactggataaatgtacctattcctaatggaagaaatgggccaaaacaaagcctacaggccccatgcaagtccaaaacccagcgaggcagtcattaaatcttaatgctctgaaatgatatcctctgactccatctctcacatccagggcacagtgatgcaataggtgggctcccactgtcttgggcaactctgcccctgtggctttgcagggtacagaccccccctcagctgctttcatgggctggcattgagtgtctctggctttttcaggcacacgttgcaagctgttggtggatctaccattctggggactggaggacgtggccttcttctcatagctccactaggtagtaccccagtagggagtctgtgtgggggctccgaccccacatttcccttcctgcagtgccctagcagaggttctccgtgagttccacccctgcagcaaacctctgcctggacatcaggcatttccatacctcctctgaaatctaggtggaggttccctcccaaatatcagttcatgacttctttgcacccacaggcccaacaccatgtgcaagccaccaaggcttggggcttaaactctgaagcaatggctggagctgtaccttgccccttttagccatggctggagttgaagcagctgggatgcagggcgccatgtcccgaggctgcatagagcagggggacccagggccagcagctgggatgcagggctccatgtcctgaggctgcactgaacagcctgggccaggcccacaaaaccatttttccctcctaggcctctgggcctgtgatgggaggggctgccgggaaggtctctgacaggcactggagacattttccccatcaccttcgtggttaacattccactcctcgttacttatgcaaatttctgcagcagccttgaatttctccccagaaaacgggtttttcttttctattgcatagccaggctgcaaattttccaaacttttctgccttgcttcctcttgaacactttagcacttagacatttcttctgccagataccctaaatcatctctctcaagttcaaagttccacagatatgtagggcaggggcaagaagctgccattctctttgctaaagcatagcaagagtcacctttactccagtccccaacaagttcctcatctccatctaagaccaccacagcctgggcttcatggcccatattgctaaatcagcattttgatcaaaaccattcatcaagtctctaggaagttccaaactttcccacatttcctgtcttctgctgagccctccaaactgttccagcctctgcctgttacccagttccaaagtcacttccacattttcgggtatccttacagcagtatttcactacctcagtaccagtttactatatttgtccgttctcacactgctattaagaaataccctggctgggcacagtggctcactcctgtaatcccagcactttgggaggctggggcaggtggatcatctgaggtaggagtttgagaccagcctggccaatatggtgaaaccccatctctactaaaaatacaaaaattagccgggtatggtggcaggtgcctgtaatcctagctactcgggaggctgaagcaagagaatcacttgcacccagggggtggaagttgcaatgagctgagatcgtgccactgcactccagcctgggtgacagagcaaaactctgtctcaaagagatacgcgatacttggccaggcttggtggcccactccggtaatcccagcaccttgggggggctgaggtggacgggtcacttgagatcaggagtttgagaccagactggccaacatggcgaaaccccgtctctactaagaataacaacaacaacaaaaattagccgggcatggtggctcatacctgttatcccagctacttgggaggctgaggcaggagaattgcttgaacccaggaagcggaggttgcggtgagctgagatcaagccactgcactccaggctcggggaaagaatgagagtttgtctcaaaaaaaaaaaaaaaaaaaaaaaaaagacatacccgagactggataatttataaaggaaagaggttgaattgactcacagttccgcatggttgggaggtctcaggaaacttaccatcatggtagaaggcaaaggagaagcaggcatcttcttcacaggacagcaggatggagtgagtgcaagcaggggaaatgcaagatgcttataaaaccattagattggccgggtgcagtggctcacacctgtaatcccagcactttgggaggccgaggagggcggatcacctgaggtcaggagtttgagaccagcctggcaaacatggtgaaaccccatctctactaaaaatacaataattagccaggcgtggtggcacgtgcctgtaatcccagctactcaggaagctgaggcaggataatcacttgaacccaggatgcagatgttgcagttagcagagatcgtgccactgcactccagcctgggcggcagagcaagactcagtctcaaaataaataaataaaacccatgagatctcaggagaactcatgatcatgagaacagcatggggcaaccgtccccatgattcggttaccttcacctggtcccacccttgacacgtggggattatggagattacaattcaagatgagatctgggtggggacgcagagcctaaccatattgtttccagaccaaaccgagggtggggctgcttattcttgcagcccaataatgagatgcagatgaactggggaaaaagagagtttttatttctgtaaccggttacagggagaaggcctggaaattattgccaaaccaactcaaaattacaaagttttgcagagcttatataccttctaagctatttgtctacatgtgggtttgcattcatctaaagatataagtgattaacttctctgtaaccaagatctgagtcctgaagaccttcctctggagcctcagtaaatttacttaatctaaatgggtccaggtgctggggtgattacccttatcttgtctccttttaaatcatggaggtttggggagtttccttagaaccccaataaacttattcgtggaggcctggggagtttcttcagacccccaataaaatgtatttaatcctaaacgagtcctgttaagaattccttcattatcttttcatcctttaaggcccaggaaaggcctaggcaaaactcttggtgggcttttgttacattccagcctgtacatgagggcactggctctatcagcttttaatcaacttaaccactcagtcagtgctgaaaccgttgtcatggaagcctgcctgctcagctgttagtgagacctggcctgccacagtaccagggttcatgcctgtcaccaattccatgatcattttcatggggtgtctgactgacatttgtgatggggttgcctccgctcatcacagtcaacatgcacctcaccagcatttttattcttacaggttgttgccatggagctgaggatgaggaggcacctttagagccaggtgtttctgtaggagtgtcacaggtcatggctccaaagccctgtctatctacccagaatacccagccctgtgagacatgtagctcacttctgaaggacattctgcgtctggctgagcatgacggaacacaccccgagcagggactgtacacgtgtccagcacatcttcaccagcaccaaaaggagcagattagagagaaactttctagaggggatggaggaagaccgacatttgtgaagaaccacagagttcacatggcagggaagaccttcttgtgcagtgaatgtgggaaagcctttagccacaaacataaactttctgaccatcagaaaatccacactggagaaagaacttataagtgcagcaaatgtgggatattgtttatggaaaggtccacactcaatagacatcagagaactcacactggagaaaggccttatgagtgcaatgaatgtgggaaagcctttctttgtaagtctcaccttgttcgtcaccagacaatccactctggagaaaggccttatgagtgcagtgaatgtgggaaattgtttatgtggagttccacactcattacacatcagagggttcacactggaaagaggccttatggttgcagtgaatgtgggaagttctttaagtgcaactcaaacctctttaggcattacagaattcatacaggaaaaaggtcttatggttgcagtgaatgtgggaaattctttatggaaaggtctacactcagtagacatcagagagttcacactggagaaaggccttatgagtgcaatgaatgtgggaaattcttcagcttgaaatccgtcctcattcaacaccaaagagttcacactggagaacggccttatgaatgcagtgagtgtgggaaggccttccttacaaagtcccacctcatttgtcatcagacagttcacactgcagcaaagcagtgcagtgaatgtgggaaattctttaggtataactctacacttctcagacatcagaaagtccacactggataaggcccttatgaatgcagtggatatgggaaagccttcagtcaccaacatattgtggctggacagcaggcagtacacactggagaaagactgaatgccgtgaacgtgggtaattatgtaggtacagctctccagtcgctatgtatcagagaattcacactgcagaaatgtgtgttcagcaaactcgggacattattttggtttgactctcatctcattagacattggagagtttacactgaagaagagtcttttcaataaagtagaaagtggtaaagattcaacatgcaagattgtacttattgggcttcagaatatccacactagtgaaagtcttctgagtacagcaaatgtgtgacattattttgctactactccacactacttagacatcatgtagttcacactggaaaaaggccacgtatgtgccttgaatgtagccaaaatgacgaacaacacccagaaatctgtgatttagcactgagaactagtattatatggtttttaaaaaacaatggtgaagtacatgccacataaaatttgccatcttaactattgtaatgtcttgtttaatacttgaagtacattaacattgttgagcaaagaatatcctgaactctttatcttgtaaaatgaaactctataaccaccattaaaaaaacaactcattcccacattcttcagtccctggcgaccaccatatttttaagtcattatgactctgactattcttggtacttctcagaagaagaatcttagagtgtttttcattattttttttcacttaggataatatcctcaaagttcattcattttttagcatgtgtcagaaattttaaggctgagcaatatttcattgtttgcatttaccacatttcctttatttctgacatctattcatggacacttgggttacttctacctctggctattgtgaatattgctactacaagcataagggcacaaatatctctttgagaccctgctttcaattcttattgggtaccccaaaaagtggaactgctggatcacatggtacttctaactttaattctttgatgaactgagaaacttttccataaaacttgcaccgttttacattcctaacattccacaaaagttgtgatttgtcctcattctaatccatagaaggcaacatttctaacaggtttctaggtgattttgttgttgctgatgtagggactacattttgagaactgtcctatcccatttttataacaatgcagagcttctctgtaaataccccttgtttctatgttctatcctgtgagccttttcattttgttaatttttcccagtgtttacaaccaggaaatagcttgtcatctttgatacaaaacagaaatctttgcaaaataccaattgcattctgtagcccttggatcattttctcccccaatctatgtagatatttagtggtgtataatgttgtatgagaatacatcatggtaagaatacattttaaaggactttaagtcaggtcacaaaatacagcaatttacctgtggacctgccctctacccaggccatccagtcccaatgactgtgctcttactgctgctttccaggtgtgtacctatcatggggtgtgcatgccactgaccattcctctgtgctcttactgctgctttccaggtgtgtacctatcatggggtgtgcatgccattgagcattcctcttaatgggttctaggcaacagatagaatagcttaggtgccaaagccacagaacctatcaggggttgtgtcattttgaaaattatgccaaattctaaatgatcttgtatgacagcagtcccccaacctttttggcaccaggaactggtttcatgcgagacagtttttctgtggatggcagtgcagggggctggatggtttcggaatgaaactcttccacctcagatcatcaggcattagttagattcacataaggagtgcacctaggtccctcgcatgtaacagttcacagtagggtttgtgctcctatgatgtctaatgccgccgctgatcaggaggtggagatcaggcaggaatgctcgctcctgctgtgcggcactgtgtggcctagttcctgacaggccacggactggtacggtctgtggtttaggggttggggattgctgttaaatgggatttggggaattttatttgggttctctctttgactagtctattgtcaaagttattccatctaatttttctagagtaagccaggttctgtgtcatgtaatagagccacataaacagcaaaggtgctattgtgaactgtgcatacgagggatcaagttgtgttccttatgtgaatctgagctaaaataagaaaaaaaaaaatttagcctgtgaggtcagaagcaagacagtcatgttagatttctgtcattattcatagttctgcaaaggtggtttcaggttctgcatcaactgaaacgtgctcttccatccagcagcatttaaaaccaaagatgctgtcccttaattagttaactctcacaatccattttagtaatggttcctcaggaaactgactacttcaatctataaagtaaaacaagttcttcacattatactctctggtttgaatagttacttggttttgttcttccccacaatgactaccttcttggtagccgtaggtctcagaggcattttctgttgtccctaaatgattctgcccttggtgggaggtggcttttaggctggctggtggctttcgttcagatggactgaaatctaagcttgatctagcatcaagtttggacccagcactctctaatttttttttttttagctgttatagataacaaaggattgagtaatttgctttttgcttattagcttgcattttcttatgcatccagtgaaccagagattgaatattttgctttttgcatattagtttgcattttcttatgcatccagtgtaccaactccctgggagctggatccatctctaaatttccatggtaactcttacctttagtaactgagcacagacagccacagttccataccatgtatggccatttggccactaaggaatcaaaggtttttcatcctccacccatttttaaattgaggattattcaaaagttaaagaaaaaactttattatctcttattaatatatgtaaattgtgttcaaaatagaaaatgaacttctactttttttttttttttttttgagatggagtctcactctgttgcccaggccagagtgcaatggtgcgatcttggctcacttcaacctctgcctcccgggttcaagtggttctcctgccacagccccctgagttgctgggattacaggtgtgcaccaccttgcctggctaatttttgtatttttagtagagacggggtttcaccatgttggccagactggtctcaaactcctgacctcgtgatccgcccgcctctgcctccacctcccaaagtgcttggattagaggtggagccaccgcacccagcttttttttttttttttttttgagacagagtcttgctctgttgcccaggctggagtgcagtgatgtgatctcggctcactgcaacctcagcctcctgggttcaagcaattcccctgcctcagcctcctgagtagctgggactacaggtgcgcacaaccacgcccggctaattttttatattttagtagatatggggtttcaccatattagccatgattgtctcaatctcctgaccttgtgatctgcccgccttagcatcccaaagtgccaggattacaggcatgagccactgcgcccagccgaaattctatttttatatttgtgtattgtcaatactaaagctaatttgaataaagtcttataaacaaatccatccaattttaatcaggttttgaccacacaaggtaagatttttccgtaaaccttttataccttcttacaaatttttttctatttttctctttccccaatttttagatctatttacctttgtttgagacagaatctcactctgtcacccatactggagtgcagtggtttgatcttggctcactgcaacctccacctcccaggttcaagtgattctcgtgcctcagccccccacatagctgggattacaggcacacaccaccatgtccggctaatttttgtattagtagagatgaggtttctccatgttggccaggctggtttcaaactcctggcctcaagtgattcacccacctcagcctcccaaagttctgaaattataggcttgagccactacgcccagtcctagatctatttacttttatctacattattttcctttcattttgaaacgacctttacataacccctaaactagacagaattcctttttttttctttctttcttttttttttttttttttgagagaagtctcactcttgttcctcaggcttgagtgcaatggcccgatcttggctcactgtaacctctgcctcccgggttcaaacaattctcctgcctctgtctcccaggtaactgggattaaggcacctaccatcacgcctggctaatttttgtatttttttttagtagagacgggttttcaccaagttggccaggctggtctcgaactcctgacctcagatgatctgcctgccttggcctcccaaagtgctgggattacaggcgtgagccaccacgcccggcccagaattactttttctttagcaaaaaccacatcttcattttttaaatataagcttcttcacaaaaaacacatagtaaacatcatggcactgggctgcacaatactttgatagagcacgttgatgtaaagacatttttgtaagtgtttagagcatgccttttatatctaaacatgcaaagaaatgagtagcctcctgtcgtaataaccatttactgtaaacaactgccaccagctgcttctgacactgcagctcttgcttgtgacagccattacgcacaaaaacgtcaagttctttcacaggacaaagtaatctctggtaccccccaaaaccaatgatatcaggtaatgcactacaaaagaaggcagaattttagacctgagataaatctgtcctcttaaaactcttgagtgagagagagagagagagagagagagagagggagagagatttcctcatctggttagtgtagatagcaggttggcttcctgagctggtcagtgcagtagtgggttagagttctgttttatatttggcttggccattgttgatttctatagtcaatttcttacatgtaaacaaggaagatagctataatattgagatttcttgttttcttaactggtcttaggttgaaaattgatttttcattctcctccccgctcccccctccccccaccatcccattcttctgcctctgccggatcttcagctgggtagcattttggttttgtttgttttttaacctggaggatgtccccaaatatcaaaacctaaacttctgattcttagaagtcctcccttcgatgagttgctagttttatttctgaacatgaacttaccaaaacatcccccagaaatcccctggtctcagacataactctctatgcttcccattccatggcagcaactcagcctaactcatccaaagcaaaaaagcaatcccttcttgcttaagtgacacaaggatccccagatgaacaagtagctgtatcacccttcaattaaatgtaataatatttacttctggtggaacctctccttccttggaacaaagggcccccaaccagcagaatttacaattaagaagaagtggccagacacagtggctcaagcctgtaatcccagcactttgggaggccgaggcaggcagatcataaggtcaggagttcgagaccagcctggccaacatggtgaaaccctatctctactaaagatacaaaaaattagctgtgcgtggtggtgcgtgcctgtaatcacagctactcgggaggctgaggcaggagaattgctttaacccgggaagagggggttgcagtgggctgagatcatgccattgcactccagcctgggcgacagggcaaaaaaaaaaattagccgggcatggtggcgggcgcctataatctcagctattcaggaggctgaggcagaagaatcgcttgaagccgggaggcagaggttgcagtgagctgagatcgcgccaatgcactccagcctgggtgacagagcaagattctgtctcaaaaaaaaaaaaagaaaaaaagaaaaaagaagaagggtagcagaaattctgtgaatgagttactaggttcaaaaatgaggatgctcaatataatgcataggttcagaaaaaaattacgatgaaaagaattgtcaaattttgtaactgatacttgacctggttaaatttgaattatttctaattccctatgtatatgtgcagtgagataaaagataaatattgtatgtgacatactcatcataaaattatttgttgtttatctgaaatacattctaaatcaggggtccccaacccctggggccacagatgagtactatggcctgttaggaatggggccatatagcagagggtgagtggcagatgagtgagcattgctgcctgatctccgcctcctgtcagatcggcagcagcattagattctcataggggtgcaaaccctactgtgaactgcacaagagagggatctaggttgtatgctccttatgagaatctaatgcctctgaaaccatctgcccccaaacccctctcccttatccatggaaaaattgtcttccacaaaaccggtccctggtactaaaaagcttggggatcacagttctaatgacataactctttccctgataatttgcttctacttaacaattccttgttttatataatttgcttacagaattcctgcagttacagtcttgatgccatttatgttgtgacaaaccttcgtcatttgtcatattcaacttatttcattcctttatctattggacattcattaatgagaaacacactcaacagtagcattctgagcctaaagactcatgatgataaacagtgtagaaaacattacaaactctattataattattctaccatctccatctgattttaacaaaaaagttattttgtctctttctttggaactagttgagaaaatcatgcaccttccaaagttaatatatatttgactgtccaccattttcattagtcaatgggcaattacatagagtcgaagaccttcaaagggaattttaaatactcctcagttcatcataaattataaacttgcattttgacattttttgcattcaatatactcaaaatatagacaatagcaacttctacaagagttgaaaaacattgtgggtacagtggctcatgcctgtaatcgcagcactttgggaggcctaggcggacagatcacttgaggtcaggagttcgagaccagtatggccaacatggcgaaaccccatctctaatagaaatacaaaaaattagccaggcatggtgccacgcgcctgtaatcccagctacttgggaggctgaggcatgagaatcacttgaacctgggagccagaggttgcagtgagccgagattgcgccactgcactccagctgggtgacagagtgaaactgtatcttaaaaaaaaaaaagaaaagaaagaaaaaagaaaacactggagaaaacgttggattttacaatgtatgtctgggtcagttagtctaccatttcatatccaaactcataactaattacaaacagatggaaccattgaaagcttgcaaacttttaaattatattcatataattaaaatataagtaataatttatattcaattaagaataaatggggccaggcgtggtggctcatgcctgtaatcccagcactttgggaggccgaggcaggcggatcatgaggtcaagagatcgagaccatcctggccaacatggtgaaatcccgtctctactaaaaatacaaaaaaattaactgggcgtggtggcgtgcatatgtagttccagctacttgagagtctgaggcaggagaatcacttgaaccggagaggcggaggttgcagtgagccgagatcacaccactgcactccagcccagcgacagagtgagactccgtctcaaaaaaaaaaaaaagaataaatagattttgatatctcaagggaaaaaaagtgatattcctatttgtctgcagggcagagctgtagtggtcaggcagtctcctcaaacaaagccaaaactgctattatatgagcttttaggaaggctggccttcagggactgaggactttcagaagcagcagagttgaaagactgatggactttcaggtatgttagtgtaaatgcaaccatttaccaactggctttcataaacaggattactgacaggaggcacttgtggattagttgttgccagcagcctggggctgccactgattgaccatctttagtactgggccttacccccattggaaaaattttagaatcttggcctaacaatgatttgctaagtttctggttaattactggggtgaagcttttgctgactagctgacttttaaagcataggtacacatcccaagttatctctaattaatggtggtttcttgtttatgattatggatttggggcagagataaattttttccttacttgaacataagccagcaacttaattctcattccccatttttggtttcccaacagccagaatttgtaagaaatcatatgctatggtttggatgtttgtctcttccaaagctcatgttgaaatttaatttccaatgtttgaggtggggcctaataggaggtgttctggtcatgagggtagatcctacctgaatacccccacttgaagatgtgtaaattctcactctattagttcccaagaaagctggttgttgaaaagagcctgatacactccccacccactgtcctcctctcttgcaatatgattccttcgcattatagctctctttcgttttccaccatgaatagaacccgccgaagaccctcaccagatgcagatgcccaattttaaactttccacacatcaacattttgagccaaataaacatttttttctttataaattaccagcttcaggtattcatttatagcaacgctaactggactaagacatcataagtattatctagatatttgtttgtgaggatatgattttcaactcatgttgccaatgagtaatttaacggccagttacagtctgagaaaaatgtgtctcccactggtgattctttgtaatatattacaaccagctgatatgtaggatatgtaggccattctgataagtcaatacaggattcaggaaaaatcgttatatataggtcatattcttaaactgtgcccaggtcttaattaataattagcaatgacacagaggggacactgccatcaaaagaaaagattaatgttacagttccctggaaataagaggcactgaacaccacacaggccacaagaaaccttattacatacagagactggaaagcagaaagagaaaacagagtaactggaagtatgtctttataactaaagtggcagagaatgatgaggtagagataccgtcgatgggcaggaaggaaaaacacattttagtgtttgtggttggggggttttatatgagtttcatgcacttgagtaagtggcttgcaagaaaaaaagtaaacaactttggttctattagtttgaccctgtgattaatgaatatcaaacagacaaatacagaatctaagaaaacatagaacagtcctgtatacacatagcagctgggaaacctattcccagtgtgtcccatgcacctatcattgatctgaaacccaatacatatgtgctcattgaacatttactagagaagtaaatacacattatcacacagcttctctattcatttttatctgtggcaagtctttcagtttatcatctgtacttacccctctaagcagttaatgagcaatgttttcaagtgtgtaaaaaaattacattttggaaacaaaagcatagtgtgtccaagtgtccagcagagccacaggttcaacttcattctctgacttctcagaatttgctgtctctcactcaaacattgagatcttatctttttctcacattacagatcgatttctctagggcttctggttttttttcttttggaataacctacataattactaatagatttcggtaatttttttatttcacaagtgtttttcacatttcgactccctgtgcaaatacagttgtaaacacaggtgaaattttaaatcacttctgaggaagaagataacatcatggaattccacaccttttttgaggataagatgtgcatatgcttcaactatgaaaacggtagacaatgttgtccagaaatggcatgtatcagctgctcttgagaaataaaaataaaattctaagcaccccctaactgactgaatggatgccctcttgaccatgagaaccctagaataactttggaagctgaattcaccactatagaggaacgggaaatcagacacacctcattatatcccctaccacactacaatcattaggttttcttccctaagggctaaatagaaatcaaccttttcagaagactactagcttatcttccaaggtacagaacagagagaagatgagattattcattccttcatccttctctgagacatcttctttattcccttttcccctcacgtgtttactctatcttatgtaaaatgtagatttactgggcactaactaaagtttcacatgtctgtaatcatttgtctcactgccaacccctcttcctttttaaggaaaatgtataataaatactaaacctcctaagaacctctttggaaaaaccagccacagatgcttctgtgacttacatttttctggatgtgcccttaggctggtccagtaatcctccatgatttgtgacttatgcctcaatcactcattttggtcgtcactctcattttcagataggattgtgattcttaaaataaatggaaaatatctcagatatgaagtagtaagtattattagaataaaagcgttgcacccttcgtaggaacacaatcgctgactctacagtcaggtaagatgtattctctttgatccagaggcatagcttcaccctttcaacctacttcagcgtctcctgtcatccttcctacaaattccagtccatagccctaactgcgtagtctttctttcttcttctggaccaaacatattgaagcttactaaacagacgccaaagcgtaactgtatgtgtatttgaaaagcaataatatggctggcaggcatgagtagaggcagactgcctttatggtatggggtgtctctttggacctgtagttattgggaattagctgtgcttaatagagtcttaagtaataagttgctaacatttctgtaaatatcctatactacaatccaaaaaaataccgtatgttgcctttaagagcaagccaagccccctcctgtctttggagtcggggactccgtttcccagctcccctgacagtgccactgggcctttatctgccatataaggactgatcaacgctctaagacaagtccggaagcggtgtcgaaacttcataacccagaagacactgcagctctcggcggcacgacttacccaataaaggcttagaaggggacgtttgcgtgcgtgcgcaccgtcggagggcgggacttccgccgtcctcctggtggtggtcgttttggttctgtgtggtgtttcaccaacttcggcctatggctctgtctgacgtcaccgaagtgacggaacggaaaagcgcgagaagcggctcggttcccaccacggagaggcgggagtgagtcaactgacaagcgctggggacagtggcgtccttgtcttgcctttgtcgctcccgccccgctcttccctggctgggctggcggaggccttgctgatgaacctgactgaggtgggtgtcccgtcccaggctcccccgcccgaccggtcctcccagtgctgaagccccctgaaggggccctgcaggtcaggccccttgtcccgaagagaggggcgttcctgtgtggggtccccgtatcagccgatttgatgcagcctcagagctcccgttagggacctcaggttcagagcatggaggcgctgccgagtgggctgtgttggggcgtcaggggtgtgtgttgtttctgcgggaaagagagggttttgtgaattctcgcttggaatggcaacctgagcagccagtaaccatggaaggttgtcaagggagggacagttggagggggcaggtccagagttcgaagtttcaagttaggaaaaccaggttaggaatggacacagggagacgcgaaaaggccctgaggccactgcagtagacccaggagaattatggttggggctggaccagtgacagtagagggagatgtgatgagattcttcataggcctgaaagatagggcccgtaggttttcctggtgcttcagttatgtctgaacaaaggcagtgaagaaccgtttcaagtgtttgttttgttttttgttttctgtttgaacgtttggaagaatggagttggggaagtcagcataaagagcagatttccgggagaagatcacaggttggattttggacatggtgattctcaaatgtctcaagatggatatgtcacacagacaggtggacataaaggtgtggagtctgaggaaggggattgggttggcgataccagacggatggagggcttggactgggccagagaatggtctgaggatcagattgagtaggtcggtctcgggttttttttgtttgtttgtttgcataaatttaaggagtcaagtgcagttttgttatatggatatatttgcatagtggtcaagtctgggcttttaatgtatccatcgcctgaataatgtacattgtatccattaagtaatttttcatcactcatcttcgtctcatccttctacctgtttggagtctccaatgtttgtcattccacactctttgtccatgtgtacacattattcagcttccacttgtaagtgagaacatttggtatttgactttctgtttctgagttgtttcatttaataatggcctccagttccatccacattgctgtaaaagacatagtttcatgcttttttttttttttgtggcctagtggtattaccttgtgtatatatatgccacattttctttacccagtcatacattgatggataattggttaattccctatctttgctattgtgaatagtgctgtgataaaaatacatgttttttttaatgtaatgatttattttcctttgggtagatgcccagtagtggaattggtggatttaatggcagttctattttcagttatttgaaaaatcttcatactgttttccattgaggttgtacttatttacattctcaccaacagtgtgtaacctttttctcttctccatatcctgggcaacatcagttgttttttgacatttaaatgatagccattctgactggtgtaaggagatactgtggttttaatttgaatttgtctgatgattaatgatgttgagcatttttttatatgcctgcttgcgatttatgtgtcttctttttgaaaaatgtctgccctgtgcttactgttttttttttttttttttttttgaaatggagtctcgctccgtcgcccaggctggagtgcagtggcgcgatctcggctcactgcaacctccacctcccaggttagttcaagcaattctgctgcctcagcctcccaagtagctgggattacaggtgcccaccaccacgcccagctaattttttgtatttttagtagagacggggtttcaccatgttggccaggctggtcttgaactcctgacctcaggtgatccacctgcctcggcctcccaaagtgctgggattacaggtgtgagccaccgcgcccagccctgtgcttactgttaatgagattttttgttgttgtttttttgttatgttttgtttgtttgttgttgagttctttgtaaattctggatattagtaccctgtcagatgcatagtttgcaaatatttcatcccatttttcaggttgtacatttacttggttgattagtccttttgctatacagaagctgtttagtttaattaggtcctgtctacttttgtttatgttgtttatgcttttgaagtcttattcatgaatttttttgcctagaccaatgtccagaaggggtttccctgagttttcctttagtattcttcgttcaggtcttacatttaaatctttaattcatcttgagttgatttttgtatatggcaagagaaattggtccagattcattctttttcatatggcaatccagttttcccagcacattttattgaaaagtgtgtcctttccgtagtgtgcatatttgttgcctttctcaaagatcagttggctatagatatgtggctttatttctaggaactttgttctgttccattgatctatgtgtctatttctgcagtcaaatgctttaccactgagctgtacaccttatgtgtctatttctatccattaccatgctgttttggttactaacaacttgtagtataatttgaagtcagatggacttaatttgagggaaatcttgaggttgtcatttcaggtgggctctgtgttgagagaacagggggctgagacttgggggccagaccattggtggctccacagacatcatactctgtccagaacggtgcagacctggcataacagggattctggattgcatctgtaaaaagggaggcctggactgggtaagcatatggcctgggatggaggctgaagtgtgaggtggtttcgatcctgcacctgcaggcttggttgaccctcagggccactctctgttgaacaagagaaatgttattgaggctggtggagtagctgggttccagatcagagcactgctttttccccttctctacatgtcagggctacaggggatgatctactgctccagccaaggtctcctggcaagctcactttagaagattatgtagcaggtagacctggttgcagaaaggaccagtacctgacctgcctactcttcccttctctataactcattaacttaataatgtatgaaacacttattgatttaaaccccaattagacagtatctttctaagtgtgtgcaaacagataggcagttaatagtgaagtcattatgttaaatttctaaaagtgagccgggtgtggtggctcacacctgtaatcccagcactttgggaggccgaggtgggtggatcacctgtggtcgggagttcgagaccagcctgaccaacatggagaaaccctgtctctactaaaaatacaaaattagccgggtgtggtggcgcatgcctgtaatcccagcttctcaggaggctgaggcaggcgaattgcttgaaaacaggaggcggaggttgcagtgagccaagaccacgccattgcactccagcctgggcaagaagagcaaaactctgtctcacaatagaggagaggagaggggaggggaggggagggcagaggaggggaggggggagggcaggggaggggaggggagaaagtggttcataattggtttgatgttaatttatctcgtttgctttccttggaaaaagttaatatcgcatcctctaaaatcttaagctaaaaacatacatgaaaatttcaaaaccccactctttcatttgcattgaactcatgtacaaaaccattaatcttggaccatagccgctgatatatatagtacatgctactgatgtttgatactaatatgagccctgtgagggggcagctattcttgcaatctatttacagatggagacactgaagctcaggtgggtttggttcttttccatggtcacagagctgcagcactgaggcctgaggaactttattcaatgaattgagatcagtttgctcccaggcagggcagacgaggtggtggtccatctcagcctgaaggatccttccatggctgtcaatttctcacggcctttctcttccctcagggtcccctggcgatggcagaaatggaccctacacaggtgagtagagtgtttcctactattcacccaccctggttatctcccagatggttttggcaggtgacaaaacctcttttcctgtctttctcttatgtctgaagggtgagtggtttcaccagttagtttcagtattacaagttggctgctgggttacatagactggtccccgtttttgagaattgatctgataagatatgtttgggcctcttgggcacaggattcagaatgtttcaatgtttggaggagagactgagctaggtttttagggaactgcaaatgtctgttacatctggtaggaatacggagcagaatgggaggtggctagaggcacacaaacatcaggcctggaatgacagcctaggtcctgggtctgtaatctaagggaagtgggagacggggaagatttgaagcaaaataggtagtgataggaccccagtttaagagactttctttggcttctgagtggaggacagactgtggaggtgagggtaatggaagggagatctgagaggatgttcctgcagcagtctaggtggatgttggtggtggcttgtcaagagtggtcatagcttcagttttaactagagctgcccacattttatgatacagagagtgaggcagctggggaggtgggatagaaggggaatcaggagtggccccatggtttttgtttggaagcatagatgctccatcagctaagatgggagaagtcagcagtattaggaattttcagagtgagtgtgaggagtcagtgtttgttcaagccacagatgtctcagagactcctgatggaggagttcaggttggagatgtccacactatggtggctgtcgtatggaccaggatgaagccatggattcagtttaggtgacagcatctctaggttatggtggcagtgctgttcgaagacagagaattggaatggggcatgagaactgggtctcttactgggtagctgtgcagtggtggaggagtcactagacaaatgagggaatggagtgtttgtggggatgagtgtatgtgagatggtggggtataggagtgagaaagacttctgaaggagagtggacatgatggggttgctgaggggggataatagggtgaggtcggagagttgctaactatcagttgggaggaggtgaggatgggagttgtattaatccgtttccatactgctgtaaagaactacctgagactgggtaatttatgaagaaaagaggtttaaccaactcacagttcttcaggcttaacaggaagcataactgggaggcctcaggaaacacaatcctggcggaaggtgaaggggaagcgaggcacatcttcccatgatggagcaggagagagggagagaatgaagggggaagagccaaacacttttaaacaaccagatctcgtgagaacttactattatgagaaaggcaaggggaaaatatgccctcatgatccagtcacatcccaccaggtccctcccctgacacgtggggattacaatttgacatgagatttgggtggggacacagagccaaaccatatcaggagtggaaatatggaggtcagtgcagctgggcttggaatgaggttttggtggagagcaattttcctgactgtttatgggacagagtgtaccatgaggcaggacacagctgagagtatgggaagtcctcacatggtttgggcagctgacagtgaagtgagaaacagggccgtgtagggaaccttcaacccagggcttagggctgcccccggtgctaggggactttggtgttctggggcaggactgggaatgaattggatgctgagcgtatttgccgtgcaccacctggtttccgtgtgcagagtggcctgttaggaggtgaaggaaatgcctgtggtgtgggctgggagttgtctgtggaattgactggagtggaggtgtgagagatgggattggagtgctgtccaaagagtgatgtgcaggcaggaggagtgtgaatggagggcctcaggccctggccctggtagctcaagggaggaggatgagtctgagtttggttgtcttgggaggcaagatctgggtgactccatggcaactggctggcaggagaggatggatccccccacgggaggcccacattccttttctaccttatcttccatctgtttcctctgtgtgctggacacggtggccaatgtcaatatggagagaaaagtcactcatgccacctggatgtggtttctcttccacattgggagggtgtggaagagattgagcaaggaatggaggcgtaggggacagcgatgagatcctggagagagaaatgtagcagtcattttacctattgggttttaatttatggatgtgagtgattgatgctggggacaggccaatgactgaaagaagatatttattccttgcatttccccaaggggggtacataccacataacacagggccacatggtgaggcaccagatttggtcaggaggaaaattggagtgaggggaaagtttagtttagtccacggacgctattggggtttccaagggaaagcaatgcagggctgggcgtcaggatagtttggctagtttaaataattccaggacacctgggctattgggactgtccctagttttgcagtacctggccctgggttgatttagagtacgggaaatattggcttggtttgagaatatgggcccagggtggtaggggagatggaaacacatttggctgttagtttggccctgtgtttaatgggtggtaaatataagtagaaaatagagaacttaagtaaatacagcttgaaaagaagctgcttatgtattcatctttcccaatttggcagggccgtgtggtctttgaggacgtggccatatatttctcccaggaggagtgggggcaccttgatgaggctcagagattgctgtaccgtgatgtgatgctggagaatttggcccttttgtcctcactaggtaaggccctcacacttgcccagtgtcctgggttaggctgtgttacccctttttacccaaaggcagctctgcgtttcccacagtgagaccgtgggtgctgcttcttttccctgtttcttggcatatatgctgtgggaggcagggctgggccgtgtgttttataccccctttttcctagcatccccatccctgctgctctgaggcttacaagaaagggctcaagagccagaaatgttgaatttggcatagagaccccaccagccttgtctgtccctggtcaggttactctgtccaaacacatgagacctgtgttctgttgtcccctttctctcactgatatttcttggtgccttcctgtgcttggaatttcaggcactgccctggtcactgattttggggactgctgagttgactatgcaggacgcaggactcttctgtgaagttcttacgattatagaatgtgggatgccatgggcttgatctctctgggcatgtgctctttactctttttctctttctttcccctagagagggccccaggcacctgagagggtggatattacttcaacaatggcattagaggctcagggacatggccctggtgcctgggaattgggaaaagggttgatgtcacagctggggtcaaatcaccctgggaacctgtcctgtgttcaccattgtttgttgccagggccactggccacagatttctaccttttcttccccattatcatttctagtatgactcctggcccctgcacctccaatgccccacagtctgtacttctggggccaccacccttcaaccattcttttccactgctccctttgaatgcctgccaacacgtggcctgtatttaacatggtgtgaggtctgcatgtatccctgaacacaagctcctctgtcacagtctgatctctctgggtttggagagaaccttctacacactgcttgccagtctccagcaaccatggcctgttgatggctgttttcagaggagtgagttggagaccctgccttctctctctgtaccatacccctcccttgtatgcttaccatcatcagggctctcccattatggggccttgccaggcccagccctgcatagtggaccctcctctcactggccttaatgtccatgatgtccccaatcccatggccttatttgtgtgtgtgcctgacacacatttgtgatggagctgcttcctcccaccagagtcaacatgcacttctccagcatttctgttctgacaggttcttggcatggagctgaggatgaggaggcaccttcacagcaaggtttttctgtaggagtgtcagaggttacagcttcaaagccctgtctgtccagccagaaggtccaccctagtgagacatgtggcccacccttgaaagacattctgtgcctggttgagcacaatggaattcatcctgagcaacacatatatatttgtgaggcagagctttttcagcacccaaagcagcaaattggagaaaatctttccagaggggatgattggataccttcatttgggaagaaccacagagttcacatggcagaggagatcttcacatgcatggagggctggaaggacttaccagccacctcatgccttctccagcaccagggccctcaaagcgagtggaagccatacagggacacagaggacagagaagcctttcagactggacaaaatgattacaaatgtagtgaatgtgggaaaaccttcacctgcagctattcatttgttgagcaccagaaaatccacacaggagaaaggtcttatgaatgtaacaaatgtgggaaattctttaagtacagtgccaatttcatgaaacatcagacagttcacactagtgaaaggacttatgagtgcagagaatgtggaaaatcctttatgtacaactaccgactcatgagacataagcgagttcacactggagaaaggccttatgagtgcaacacatgtgggaaattctttcggtacagctccacatttgttagacatcagagagttcacaccggagaaaggccgtatgagtgcagggaatgtgggaaattctttatggacagctccacactcattaaacatcagagagttcacaccggagaaagaccttataagtgcaatgattgtgggaaattttttaggtatatctccacactcattagacatcagagaattcacactggagaaaggccttatgagtgcagtgtatgtggggaattgtttaggtacaactccagccttgttaaacattggagaaatcacactggagaaaggccttataaatgcagtgaatgtgggaaatcatttaggtaccactgcaggctcattagacaccagagagtccacacgggagaaaggccttatgagtgcagcgaatgcgggaaattctttcgttacaactccaacctcattaaacattggagaaatcacactggagaaaggccttacgagtgcagagagtgtgggaaagcctttagccacaagcatatacttgttgagcaccagaaaatccacagtggagaaagaccttatgagtgcagcgaatgccagaaggcctttattagaaagtctcacctggttcatcaccagaaaatccacagtgaagagaggcttgtgtgctccatgaatgtggggaattctttagctaaaactccaacctcattaaacatcagagatttcacaatggagaaagtttaccattgactattgtaattgggtagtaatgttatataaattccacatttttatgcaactaatctccagaacatttttcctcttaccaagaagtaaaatgctgtacccattaacaacaactcattccccttccctacttccccagaaatgtctcaactatatttctatactctatggtacttatatgaggtaccaatagatatctatgaatttgatatatatttgtacctcatataagtggattctacagtatttatcttttgagactggcttatttcacttaggataaggtcttcacggttcacccatgttgtataatgtgtcagaatatccttcctttttaggtgaaataatattctatggtatttatataccacatttatttatccattcatctgttagtggatacttgggctacttccaccttttgcctattgaaataatgctgctatgaagatgagtgtacaagtgtctattcaagattctactttcaattcttatagggtatatactcagaaatggtggtgctggatcatataggatttctattttttttttttgtttgtttttgagacagagtcttgctctgtcacccaggctggagtgcagtgctgtgatcttggctcactgcaagctccgcctcccaggttcatgccattctcctgcctcaccctcccgagtagctgggactacaggtgcctgccaccacgcctggctaatttttttgtatttttagtagagacggggtttcaccgtgttagccaggatggtcctgatctcctgaccttgtgatctgcctgccttggcctctcaaagtgctgggattacgggcgtgagccaccgcgcctggccaggatttctatttttaatatttttgggaaaatttttccatagtacctgtgccattttacattcccaccagcagtgcacaaggattgcaatctatatacatcctcaccaacattgttcattttctatttctgtttttggggttttttgtagtgccttttgttttggatagcagctatcttgttggatgtgaggtggaatctatagtgtctttcatttttattttgtgaatgattgatgatgttgaggatcttttcatgtgcttgttaggcatttgtgtatctggaaaaatattcaagtcttttttttccatttttaatgggactatttgctttttgttgttgagttgtagttctttatacattctggatattaactccttaccaaatatatgctttttacatattacctcccagtccataggttgctttttcgctctgttgattgtgtcctttgatgaaattttaagttttgatgtactgttgactctttctgtctgtgggttctgtattcatggatcgaagcaaccatggatcaaaagtatttggagcatccatggattgcagtgatcattaatcaaaaatatttggaaaacaaaaagggtagttgcatctgtactaaacatgaacagacattttttcttgtcattattccctaaactatatagtataataaatatttacatagcatttacattgtattagaagttataaataacctaatgataatctatataggaagatgtgtgtaggttatattcaaacactatgcctttttatgtgagggacctcttgagcatcagatgattttggtatccacaaggggtcctggaatcagtcccccacagacaccaagggatgactgtagtgcattttatctatttttacttctgttacctgggcttttgatgttatatattaaaaaaaattagtatcaaatccaatgccaagcattttccctatgctttattctaagaattttatatttgaaggtcttacatttaggtcttttttttttttttcttttggaggcagagtcttgctctgtcacccagcctggagtgcagtagtggaatctcagctcactacaacctccgcctcctgggttcgagccatcaccccacctcagcctcccaagtagcttggattacaagtgtacaccaccacacctggctaatttttgtatttttagtagagatggggttttgccatgttggccaggctggtcttaaacttctggccttaagtgatccccctgcctcggcctcccaaattgctgagattacaggcaggagttgtaatgcactgtgcctggctacatttagatctttaatctacttggggttcatttttgcatatggtttaaggcaaaagtccactttatgtggctatccagttttccaagcaccattttttgaaaagagcatctttcctctgttgagtagtcttggcacacttgtcaaaatcatttgtccatatatgccatggtttatatgtggattctctattttattggtcatatgtctgtctttatgtcagtaccacacattttaggtgtgtgtgtgtgagactcagtgttgaggacaaggctagtgggctttcacactccagactgctgtattccagcccaaattactcaaattagccaatccatggggaacatggaaaacgtagctaatgcaatccgcttgccttacctaagttgtcccctgcagcctcaggttgctgttactgtgtttcagatgcaaccctctgtgggaccctacccaagttctctcattcttagctataggtaataaattgttctgattttgtgtatccaagtgacattgggttgtttcttgctatcagaagaacccagaaaagtattatgaatctagtgaatgttggaaaatctttagccattagcataacctcatttcgtgccagcatgttcaccctagagaaaagtagaagtgaaggcaatgtcatctttccttgttaacatgataactcagtagagcaatgctttggagattagctttttagggagagagccagcagttgagcctcctgcatctgaacatccacactagggatattgtctgtactgccagatatatgggaagattttgtgaactgtgttgcagttttcaacttgactggggcctttcccagagttatgcccctgccagtgcctatttaaaaatgtcatctcttttctaccaactggcaaagagccatggtgtgtagcattttagtcacattaaaatgcagttatggcagcatgctgtgttctctatctgaagaattcactagtcacttgaacactttggagtcctcacccccctcctatgattgattagggcatagacatcagccttggacagaagacatggactggctttggcaggcagattgcagaaatttcctttctccaggggaaagtattggttatctcattgatagtggtaggaggcagatacattgctaggcagactaaggacgggtccctggtgaaacccaaacttcaagccaacgacagtttaaagcctgaaaattgagctgccagttccaagtagagtccatgactggagtgagaacttcctcaatgccttttagccaatcaaatggtgctttttccaggcccacccatggaccaatcagtatgcagtctccattctgagcccataaaaaccctgggcccagctacacattgggctacccactttcaggtcccctcttgttgagagcttttctgccactcaataaagttccctgccttgctcactctctggtgtccacataacatcattcttcttggtcatgggacaagaactcggaaactgccaaatggcgggtgtgaaaggagctgtaacactgtagccctcctgccttccaccagccccaggcagccaccccatgtgacaggaagcagcggcagcagggccaggccagcccatgagccatgggctggagcagggtggcaggaccaaacaagctgtgacacacccccattcactgaagtgtgtggatggtgggaacagacaagctgtaacacaaatgagctgtaatgcttccttggggctcagaccttgggattccctgagcaaaagctgtaacaccccttggggctctgtggttgctggcgtctctgagtttttgggcgctgccatgtcccccttgtccagataccagcttccaaggcagaagccggtcgcagcacgcctggaccagctgtaggccaagcacagagccatggtgggcacaggatccggctggtaacatgagccaagcacagcctgtcggactgagttagttgagtgagtccagcaggccaagtgatgtctgggcagaagtgcttcagccatggaggtttctgcctggtgaagtggcactgaaagtatcttgtgtcatcatgacacttgggatggaattttccaacctgccagtcacccacactgtgaactccttctcacccctaatgcacacacataccctggttggttttgtgataataaaggtcacattgtttaagctaccttaactcttggaaatctagtcaccgtatgcagtgggttttgaacagaattggtctctgctagaataaaagcatgaatggttttttgtgggacctttactttgtgagctccagagggactagtaggaagcaaaagatcagctcgtatgcagatttgggccaatttgcattgccatgagaagcctcctgggaaagtctgaaggacttctgcacaaaatttcaagccctgagtacaaagattatttgtattcagaaaagtacaatttgaggagaaaacagttgccttgatgtttaaggcattgggcaacagtatgcattgggtatccctacccatatttcccatatttcccctgcattgatgagggatagctgtttcttgtgacctgctggaagctatgggtcctgaagtaaaacactatctaggtatatgttcctggctgttgacctttagggctagatggaagccatattcttttttttttttttttttcttgagacgtagtctcgctctgttgcccaggctggagtgcagtgggatgatctcagctcactgcaacctcgcttcctgggttcaaacaattatcctgcctcagccttccgagtagctgggactataggtgcacgccaccacacccggctaatttttgtatttttattagagatggggtttcaccatattatattggccaggctagtctcaaactcctgacctcgtgatccgcccacctcagcctcccaaagtgccaggattacaggagtgagccactgcacctggccagaagccatattctataataaatagtggttggattaataggacatgggagagactgcagtagagtggatgagtcccctctaaaggagcactcacaaatgccctggtagctatggctgtgtggggtggggtattacaggaattccaaagacctaaggagctgtgtacctcctgtagccaaggtcaatgtcagaacaactaaatcaatgattttatgaattcctgtagcctccctggactataaatttcaaaccatagttgcatcatctacatagtgatgggccttgagccttccctaaagataaaaagcctacatagcccgtgctgccccatcacctgtgtgtcggaacatcttccttgtttcaagctacatgagtgcttttttattctgttgaagtgtgtcatgtcatgcctggtgaattaataaatctgtcctctgcaactgacagggttcttccactgtgaaacaagagggttgtatataggttgcgtttaactaacagagttaattaaacctttttactttaaaaattactcagtcttgggccaggcgcggtggctcacgcctgtaatcccagcactttgggaggccgaggcaggcggatcacgatgtcaggagatcgagaccatcctggctaacacagtgaaaccccgtctctactaaaaatacaaaaattagctgggcgtggtggcaggcacctgtaatcccagctactcaggaggctgaggcaggagaatcacttgagcccaggagttggagattgtggcgagccgagattgcgccattgcactacagcctgggcaacaagagtgaaactccatcttttttttttttttttttttttttgacacagagtcttgcactgtcacccaggctggagtgcagtggtgtgatctcagctcactgcaagctctgcctcccaggttcacaccattctcctgcctcagcctcccgagtagctgggactacaggtgtccgccacgacgcccagctaagtttttgtatttttagtagagacggggtttcaccgtgttaaccaggatggtctcgatctcctgacctcatgatctgcccgcctcggcctcccaaagtgctgggattacaggcatgaaccactgtgcctggccactccatcttaaacaaatttaaaaaatagtttatctctctattttttaatttactgttgtttgtgggggttttgaagatgtatcaatgattttggttgagtagggcactttagctttacttctgagtgcatgcagcagtaaagttttttttttatgatttccttggctttaaacagttcaagtggttttctcaagtgtgttagggtgcacactgttagttattagtggaggttttggtaaagttgtgctgggaacagaatgccagatgagcttgtcttcaggcttcagcagtactggtggtgagctatgtatgtttatccttgtactttgcggtgctgaatgttggtacctgtgttggcagttctaggcaggccgattcttgggcctctggttggctttcttagatgctggttgtgatagcagtgtaccaagcatgtgagtgcactcttgagcccctgggctgctggtgtggcatccgtgatggtggtggcagtggtgcgaaactcttctgggtcgcacttgctgtgctcattagcagtggttgcagcgggctctgtgggccagccactagaccagcagatggcgcttgtaggcaggagatggctgaagtgggtgcagtagggtatttaggcctaacctcagcgccctaggagtgctcaggtgtttcacttggtggactaggttgtgcaatctctgggggattttaaaagtttattttgcaattgagaatgggatgtttagaatttttgtctcctactgattaaaggtagagtatggggaaaaaaacaggcaaaactaggagtttaaagaaaaggagagagaagaaaaagaaatgaagatacaataatacagaaagaacagagggaaaaactttatttatatttaatacctatgatgtgacatgcccggagttaggagcattcataagcaccatctcatattatcctccaactaagctactcatgtcagaaaaaattaaaattaacaaaggtcaacagggagtaagaaatagaaaatggaaaggaaacaattttggagtgagacctacaaaatgatctcagaatttaccctctgataagtctttctttgatcccagagtgcacaaaatgttacatgaaaaaacaaattaatataattacatctaaatttcaagctttctatttcataaagattatgagtcaaaactgagtgagttcagggactcagagaagacatttaaaatatctaaatgtgcccagttttacggttttaggcatgcgagttttagatttttttgcttttttattgagacagggtctctttcacctaggatggagtgtagtggcgtgatcttcactcacagtagcctccacctctcaggttcaagcaatcctcccattcagcctccccagtagctgggactacaagtgcgcactaccatgcttggctaatttttaacttttttggtagagacggggatctcactatactgcccaggctggtctcgaactcctagactcaaatgatccttccacctccacctttcaaagtactgggattacaggcatgagccactgtgcccagccaaagtttcagattcttcttaaaggaataaagtcagagatcttagaaatgaactaaagcacgagcatacaataaacaagagagaaaaatcagatggttatcaagaatatgaatggatattcaaactcggtgtcagagaaatgcaaattagatattattgcatgttactttaagttctataaattactatactatggaaagaaatatggggtgatgtagctgcaatcatgtatatttcatggaagagtcaaagactgtagcagtttcataaagcaatctgcacaggtactgtaaaaaaaatgattttctagaatatcatgtgacacagaaagcctgtttctggtatatctctcagtcaagtccataaattcttatgtgagagaagttttctcacaatactgttcaaggcagcagggacatggagacaatatgttgtagcattaagtgtaagaggaggaccaaagacatctatgagtgaagtagaagactgaatgtccacactaaagtacaacagggcagttactagcatttaagtagactttgacacaggagtatatatacatattaaacacacattttgagtaccaacaaagggagaaagaagtctatagtacagtacaattaaactacacaaaaagtaacagtgctcctctttctaaaacacatgtaaatacaaaaacacacaacagacctttagaattgttgtctacaagtggtggggtgatgaagtgtgaggaacaggaatgagtggaaacacgtcggaacattgaacaagacgaggtccttgtggggacataaggagagaatgtccactcactgtccagagcctcctgggccattgtcaccatacagccgctcattacatgaaagtggaatttcaaaaggtagcgaaacacctaataaaatatgttgaaagggctgggcatggtggctcatgcctgtaatcccagcactttgggaggccaagccgggtggatcatgaggtcaggagttcaagaccagcctggccaacatggtgaaaccctgtctctactaaaaatacaaaaattagccaggtgtggtggtgcacacctgtagtcccagctactcgggagctgaggcaggagaattgcttgaacccaggaggcagaggttgcagtgagctgagatcgtgtgactgcactccagcctgggcaacagagcgagactctctctctctccctctctccatatatatatatatatatacatacacatacacaaagatatgtggcctgtcaccaagtgttagatggatgtttgggccaggcgaggtggctcatgcctgtaatcccagcactttgggaggctgaggcgggtggatcacctgaggccaggagttcaagaccagcctggccaacatggtgaaaccccgtctctactaaaagtacaaaaatcagccaggcgtggtggccatgcctgtaatcccagctactcaggaggctgaggcaggagaatcgcctgaacctgggaggcagaggttgccgtgagccgagatcgtgccattgcactccagcctgggcgacagagagagactctatctcaaaaaaagaaaaaaaaagtttgtttagtttctgttggtaaatatctagaaatagaattgtaggatggtagggatgtattgttggtaaatgattaacatgtttttaattttcagttttttcagagacggggatctcactatattgcccaaactggttttgaacttatgaactcaagtaatcctcccgtcttaacttccatgtagctggcactactgaacagctttaactcttccagaccttcagttgggtggttttttcttttcctttcgtttccttctttctctctccttccttccttctttttgtaatttgataaaccaaatttcaagactttggccaaaaaacagtcttctcctttactgaatatctcagtgctccattttatttttccctcaccaattctgcaggagagatcacaagactatgtccatatctttatttgtgggggtatgattttcagctaacatagctgctaagtgatttaatttacaattatagtggtagaaaaatagctctaacttctgaggttttgtaatttattgtaaaaagcggaatacaggacatttaaagtgacctgacaaggtcaatacaggactgaggactaattcattaaatacgtcttacgtgtcttagaggaccacagacagctagcaaccctactcctaatgtgtcccatgcacttagtattgtacctggcatcgaatgagtgttcatcaaatatgttagagtaataaatacgacagcacagtttccctattcagctttacttttctggtaactcttttaatatatagtctttacctctcccttcaagctgttaatgcacaatgttttcaagtttgaaaaagaatcagattttggacaccaaacttgagtgtgtccaaggttccaggacaaccttagcttttttcctcctatcacaaatatgtttctctataactatttttgccactttctttggatatctacataatcgtcattaatagtttcagtaatagccatttcacaagagttattcagagacaatttcaactccctgtgcagacactgttgatacaatttcaggcgaaatgataaatcactttccactaatgagatgagatcatgcattcccaaacctttatctcaggagtaagatgctttctttgcacaagggctttgactggtggaaggccacactattctggcagataatggtagataagtcgcttttccttttcagttaggtttcagtctcttaaaataagtggaaaatatctcagatataaagtaataagtatcatgtgaataaagtgttgctgggtaggctgaaagacaataactgattattcagaaaggaaagatattactcctcaaactccccatcatgccatgtctgggtcttttcaatgtgcccagcagagcacattgaagatcataaaacagtctccagagcttcgttctgtgtgtatttggcaagcacaaaagagctgaccgctatgcgtggaagaccagttctttatggttggccatgttccttcggatgttcgtcttttgggaacttgctgtgctttacagaatctgaaaggacaggtctctgaaacatttctctgacttgttctagactgccttccgggaaaatctggatgcttgccgtttaaaagccaatgaagcccctccacgtccttggagccccgcaactgcatttctcaaagcctcaggaggatcctcctggctttcatcctgaacgcgagttaacttaagttcagaagcggggcaggcagtggcctgggaactacattacccaaaagacacagcggcggacacaagcagcgagtgtagccaatgaaggcctagcagagcggcgtctacgggggttcgcaatgcgtgtgggcgggacttcctgcaacgcctcctggggttgtcaatatggctgcgttgggatctgttcaccttcaggctgagtcgagactgaggtgaaaaagcggaaaaacgcgagaaaaggtttccccgttgtacagaggctagagtgaggctcggttgaatcggttgcaggcgttggtgcctctgtcagcgtccaggtcactgccgctcccgccccgctcttccctggctgtgctggcggaggctgcgccgatgaacctgactgaggtgggtgccgcgtcccagggcgccccgcccgatccctcctccgagtgccgaagccccgaggaggggccctgcaggtcaggcccctgtgtcccaaagagaggagcgttcttgtgtggggtaccggtgtccgcggtgctgtgaggcgggggagctcctgtcagggacctgcacgtgcgaggcttagaggtgctgcagagcgggcggcactggggagcccgagcgtctttgtctccacggagctgagggtgaggcggagtctcgcctgggagggcagcggagctgctgaaagccgtagaaggctgtgcaggaagggttatgcccagaggtagacgtttaaagttgggaaaaacaggatgttaaaccaggacaaggggaccgctgaggagaccccttgagttatggtagggatgggccagaggggttgcagtagaggggaagtgtgatgagattctggatggatctcagagatagagtcgacaggatttcctgctgcatcaaatgtagcagtgagggtagtgaagggtctattccatggattttgttttggcctgaaaatctgaaagaatggagttggagaagtcagcttagggagcaggtttcagagaggattatgagttgcattttggagggctgagttttggagggcagatcatgggtgggtccataagcctgacgctacctttagaaaggcgcagacctgtcataggagggattctggctcatatctgcaaaaacggagttctgaatgggttaaggaactggcctaggctggagactgaggtgtgaggtggtttagatttctgcacctgcagacccagcagccccccaggcccactctgtggaacaataggaaggtcatccagactagtggggacattgggtccagacgggggtagggctttctcacatctagtcaagggcctccagcaagcttccagcaactgaatttgtagcaggcaggcctggttgctgatgggaccagtaactgacctgcttgcttatcccctccctgcaacttatttatttatgaatgtgtaaaacattttttttttttttgagacagagtctcgctccatcgcccaggttggagtgcagtggcgcgatctcggctcactgcaagctccgcctcccgagttcaagcaattctcctgcctcagcctcccgagtagctgggactacaagtgcccgccaccacgccaggctaattttttgcatttttagtagagacggggtttcaccgtgttagctagtatggtctctatctcctgacctcatgatctgcacgcctcagcctcccaaagtgctgggattacaggcatgagccaccgcgcccggccgaatgtataaaacatttatttaaccactaatgaaccagtatccttctaaatatgtacacataggtcggcagttagaaatgaatgtaaccaatagttaaatttattcacttaataattgttgaatgttgatttttcttttttctttttttttttgagacggagtctcgctctgtcgccaggctggagtgcagtggcgtggtctcggctcactgcaacctctgcctcccgggttcaagcgattctcctacctcagcctcccgagtagctgggattacagacatgcgccaccatgcccatctaatttttgtatttttgatagagacagggtttcaccatggttggccaggatggtcttgatctctgcacctcgtgatccgcccacctcggcctcccaaagtgctgggattagaggcttgagccaccatgcccggctgaatgttaatttttctatttgcttgcaatggaaagttttatgtatcacatttccttaacaccgtaagaagtgggaaaaatacacacccaaaatttcaaaacccttccatgtcatttgtaccgaaaacatgtaaaaaatatttaatccagtagaaagaaattgctgatacatagtgtgtactacttatatttgatgcccatataagccctattagttggcaatccttttaatctctattttacacataagggcaccgagacttaaggaagttcagtcctcatcaagacactgaaccctgaggacttactgtgtaccctcagataactttgctctagttgcagggccagaggtggttgtacagtcagcctgtaggatgctgcaatgctgtcttaatcctcatggcctgcctcttcccacagggttcatagcagtggcagcaatgcttatggatgctggacaggtgagtggagagtgtttccagctttcacccatcccagatggtttcagcatgctgatatagggaatggtgttatcctgagactgttcaccttttcttctctctcccttgggtccaaggagagcctgtagttccaccagacctgggttccaaactcagtgcctggttatatagagtggttctagttctcacaactgatggtttgagatttggcaaggcatctcaaacacaggatctagaatgttcaaatgcttggtggtgagacttagatgggatgcttagagaactgtagcttaatgttctagctggcaaggataaggagcacagcagcagggcaggaggtcggggcatgcagggatcaggcatggaatggcagcctgaggttgtctaggtttttgtttttgttttgttttgtttttgagacagaatcttgctctgtctccaggctggagtgcagtggcgcgatctcagctcactacaacctccgccttcctggttcaagcgattctcctgccccggcctcccgagtagctgggattataggcacccgccaccatgcccggctaatttttgtattttttagtagagatggggtttcaccatgttggccaggatgttctcaatctcttgacctcgtgatctgcctgcctcggccctcccaaggtgctgggattacaggcttgagccaccacacctggccttgtttttttttttttttccagacagaggctaactctgtcgcccaggcgggagtgcattgatgtgatctcggatcattgcgacctctgtctcccaggttcaagcaattctcctgcctcagccttccaagtagctgggattacaggcatgaaccaacacacccagctaatttttgtatttttagtagagacaggatttcaccatgttggccaggctggtctcgaactcctggcctcaagtgatctgcctgcctcagcctcccaaagtgctgggattacaggtatgagccaccgtgcccagtggttctaggtctttaatctgaggggggtagtagctagggaaggtttgagaaagaaaaaagaggtgatttgacctagattctttttttttttttttgagacggagtctccctctgtcgcccaggccagagtgcagtggcgtgaactcggctcactgcaagcttcgcttcctgggttcacgccattctcctgcctcagcctcccaagtagctgggattacaggcacctgccatcatgcccggctaacttttttttgtattttttagtagagccagggtttcaccgtgttaggatggtctcgatctcctgacctcatgatctgcccgcctcagcctcccaaagtgctggaattacaggcctgagccactgcacccagccagatttgacctagattctaagaggcttcctctgcctgcagaatggaggacagagtgagagttagggaagaaccaaggatacctgggtgataattcctgccacagtccagtggaggttggtggtggctggacacgagtggcggctgtggaggtgggaggggtgggtggcttctgtaggttttgatctagagctgctcacattttttgatgtacagagcgaggaagctcgggaggtaggatgcaagagggagtcaggaatggccccattgttttggccttgttgagaaggttggatgttccagcaactaagatgtggtaaattttgtagtagggggagtttaatagagcatatgaagaacgaggtttgggctaagtcaaaaatgttccagagactcgagtagaggtgccagactggcagttgaacacacaggaatggagttcaatggaggtgttcaggatggagacatctactatatgatagccagcgtgtacaccatggtaaatctgtgggtcagatttaggaatagacatctttagattctggaggcaatgctgttagggagaaggaaggggaaggaaggggctgaggactggatctttctgttgggcacctggatggggttgctgggcatcacaaagacagatgagggagtggatggactgaggatatgtgtgtgtgtatttgtgtgtttatgttggagatggcctttggaaaataaaggcttttgagggggagagtgcacataaaagttggatggtgaggcatctccacaaaagaggtgagatgatagtgaggtctgggaggggcttagtaccctattatggactcaacagggttttgtggcaaatattggttgtacctgggtagtttcacgcgaactctgagactattttggcagaagatgggatcatctagaagcattgctagtcctggggtggggatggtgttggggaggtcagtgtatctgggctttggattagagttgggggatagagaaagtcgtgactgcttatgggacaacatatacatgtagaagggggagacagccaagatctggaactcaaaggaggtgtgcaagaatatgtgggtttggaaagctgaggtcaaagaaagaaacaggattgggttgggagacgttcaaagcaatgtttcctaaacattgcattctggtcattctaggggcaaatacgattctggttgcatttgtcatgcactgcaggatttcatgtgcagagtggcatggtaacacgccatggaaatactcccagttgggctgtggtggttgttagtgttgccaagagtggaggtgttggatacatgagggaggtgccatccaaagcctgagtggaggagcatgaatagatggttccacctctggcactgggcacttaagggaggagggtgagtccaagtttggttatctgagaggcaagatctgggtgactctagggaaattgagtgacaaaagaaaggtaggcccccatgtgccaggtgttttttttgttttgttttgttttttgagatggagtctagctctgttgcccaggatggagtgcagtggcgcgatctcggctcactgcaacctctgcctcccaggttcaagcagtactctgcctcagcctcccgagtagctgggattacaggtgcctgccaccatgcccggctaatttttgtatttttagtagagatggggttttactatcttggccaggcaggtcttgaactcctaaccttgtgatctacctgcctcagcctcccaaagtgctgggattagaggcatgagccaccatgcccggccatgtgccaggttttgatggcgcttttcagtctctttcccccacccatctttgttctatactggagtcagtgatcagtggcaatgaggggagagcaggtacaggtgccatgaagacctagtgtctcttcctccttcagaagtgggtggaggctagcagggtgtggatgtgtgtgggtgtggtgaggagcactgaaggtcctggagagggaagtgtatcagtgattgtacccacaggatttcaatctgtgaacaagagtgagtgattacagaaaagccaatgacattgaaataattttttttttcaattggtgagaaatcatacctggatgaaatgatttttattcctttcatttcctgagtgcagggagcatgccacatcacataaagccacagaggaaatagcggatttggtcaggtggcagatgcacagttgaagggagagcatatatcagtggctttattggggttttggctggaaaggcatgcaggggagagtgaagagcttaagactgggtagtttgcatgattttggcagccttggggtatagggactatccctccttttgtggtacaagccttgtgttgatttagggcaggagaaagaatcatgtgtgattgttagataggaggcagttcagtctatgggatctggattataagagaaatgttaaaatgctggttgttattttggtcctctaattcttagatttcaagtagataaatacagatctaaggaaacagaataagaagttgctcatgggccgggcgtggtggctcatgcctgtaatcccagcaatttgggaggccaaggcaggcagttcacgaggtcaggagttctagaccagcctgaacaacatggtgaaaccccatctctactaaaaatacaaaaattagccagtcatggtggcacgcgcctgtaatcccagctactcaggaggctgaggcaggagaatcacttgaatccgggaggcggagcttgcagtgagccgagatcacaccactgcactccagcctggcaacagagcgagactccatctcaaaaaaaaaaaaaaaaagaaagaaaaaaaaagttgctcacagactaaactgttataattttggcaggattatatggtttttgaggacgtggccatacatttctcccaggaggagtggggaattcttaatgacgttcagagacacctgcacagcgatgtgatgctggagaactttgcacttttgtcctcagtaggtaaggccctgacacctacgtcagtgtcttgtgctgggcaatgttttttcacttttttccttggcatctccgtctcacaccaggtcatggatgctgcatcctctcctggtttcctggcatatgtgttgtggcagctacagctgggctgtgtgatctgtatcaattttccttaagaagcttagctcttgtcactctgaagccttataaggctcaaaagtcagaagtcctcaggtttctcaagaatatcctaatgaccttgcctgtccctggttagtttactctgtccaaatgcatgacactttctctgtgcaaggctttctccattcttcttgctgacatagggataccctgtgtcaggaatttcagggacctacctcgtcactgcttgtgaggactgtgggcttatttctgcaggactctccactagaagttctggtaactttagaatacagcatgtcctgggtttattgctctgtgtacatgctgttgacaccctccctttccctgtctttcccctagcttggctaacgccacacctagatagttgctcaccttgagcaaggtagaggtccctgggtgcctgacagagtggacattactccattgaaggcaagagatgctcaaaaggacttggccctggtggatgggagctcagaaggggtgtgatgacagggctgggttcacatcacactgggaatcaatccagtttgatgcccctgccagtggccacaccgcatgtctctcttttcttccctattgtgatctctcttttgactttcatctcctggctcccacctctgaccctacgtctctggcctccacctctcacctgttcccgttttttgttttttttttgtttttgtttttgtttttgagatggagtttcgctcttgcaatggtgcgcgcgatcttgactcactgcaacctctgcttcccgggttcaagcgattcttctgcctcagcatcccaaatagctgggattacaggcatgcgccaccacacctggctaattttgtatttttagtagagacggtgtttctccatgttggtcaggctggtctcgaactcctgacctcagctgatccgcctgccttggcctcccaaagttctgggattataggtgtgagccactgcacccagccacctgttccttttactgttccctttgtagtgccctcaacatatgacctgtacttaaggtgttgtgaggtctggatgtatatatttcagcagtccctgaacaccagctctactgtcacatcagatctctctgggtctggacacagtcttctacacattgttcaccagaagctatggcctgttgaaagccattcactgaggagtaacttggggactccacttctgtgctctgcactgtaccactccctatgttgttccccatcatcaggactctttcgttatgggtttctgtcagtcccggttctgcccagtaggctttcctctcactggctttaatgtcccatgcctgtcaccaatcccatggtcttatttgtgagttggtctgacagacatttgttatggggctgcctcttccctccaaagtcatcatgcacttcatgagcatttctgttttaggttgttggcatggagccaaggatgaggaggcaccttccaagcaatgtgtttctgtaggagtgtcacaggtcacaactttaaagccagctttgtccacccagaaggcccagccctgtgagacatgtagctcacttctgaaggacattctacacctggctgagcatgacggaacacaccccaagcgtacagccaagctttacctgcaccaaaaggagcatcttagagagaagctcaccagaagtgatgaagggaggccttcgtttgtgaatgacagtgttcacctggcaaagaggaacctcacatgcatgcagggtggcaaggattttactggtgattcagatcttcaacaacaggctcttcacagtgggtggaagccacacagggacactcatggtgtggaggcctttcaaagtggacagaataattacagctgcacccaatgtgggaaagacttttgccaccaacatacactgtttgagcaccagaaaatccacacagaggaaaggccttatgagtgcagtgaatgtggcaaattgtttaggtacaactccgaccttattaaacatcagcgaaatcatactggagaaaggccttataagtgtagtgaatgtggaaaagccttcagcctcaaatacaatgttgttcaacaccagaaaattcacactggagaaaggccttatgagtgcagtgaatgtgggaaagcttttcttagaaagtctcacctacttcagcaccagaggattcacaccaggccaaggccttatgtgtgtagtgaatgtgggaaggccttccttacacaggctcaccttgttggtcaccagaaaattcatactggagaacggccttatggatgcaatgaatgtgggaaatactttatgtacagttcagcactcattagacatcagaaagttcacactggagaaaggcctttttattgctgtgaatgtgggaaattctttatggacagctgcacactcattattcaccagagagttcatactggagaaaaaccttatgaatgcaacgaatgtgggaaattctttagataccgttccacactcattagacatcagaaagttcacactggagaaaagccttatgagtgtagtgaatgtgggaagttctttatggacacttccacactcattattcatcagagagttcatactggagaaaagccttatgaatgcaacaaatgtgggaaattctttaggtattgcttcacactgaatagacatcagagagttcactctggagagaggccttatgaatgcagtgaatgtggcaaattctttgtggacagctgtacactgaagagtcatcagagagttcacactggagaaagaccttttgaatgcagcatttgtgggaaatcctttagatgtcgctccacacttgatacacatcagagaattcacactggtgaaaggccttatgagtgtagtgaatgtgggaaattctttaggcacaactcaaatcatattagacatcggagaaatcactttggagaaaggtcttttgagtgcactgagtgtgggagagtttttagccaaaattcccacctcattcggcaccaaaaagttcacactagggaaagaacttacaaatgcagcaaatgtgggaaattttttatggacagctccacactcattagtcatgagagagttcatactggagaaaagccttatgagtgcagtgaatgtgggaaagtctttagatacaactccagcctcattaaacatcggagaattcacactggagagagaccttatcagtgcagtgaatgtggaagagtctttaaccaaaattctcatctcattcagcaccagaaagttcacaccagataaagaatgtatatataaagcagatggggaaagacttcacacagaaatctactctgatttagcactgggacctacgttttaaaaaaagtattcttgtagaatacagataacataaaatctaacatcttaaccatgttaaagtgtatagttcagtactgttaagtcattcacattgtgcaatgaatatctagaagtcttttcaacttatgaaactaagtctataccttttaaaaccttattcctcactccatccagcctcttgacaagcaccgctctgtatgaattttactagtccgggtacctcatataagaaaacttaagttttggtcttcttgtggtttattttgtggcttattttgcttaacgttatatttttaaggtttcatgttctaatccattagaatttccatcctttttaaaggctgaataaaattctgttagtcatgtgttgcttaacagtggggaagtgtcctgagaaaagtgttattaggtgattttctttctttttttggtggtgggggggttgcgtgaatgcctaggctgtatggtatatcctatagcaccttgctacaaacttgtatagcatattactgtactgaatactgtaggctgttggaacacatggtaagtaattgtttttaagtatatctaaacagaaaaggtacagtaaaaatacagtataaaagaaaaaatgatagactcacagagaacttaccatgaatgaagcttacagtactgcaagttgctctaggtgagtcagtgagtggtaagtgaatgtgaaggcctaggttgttactgtgctgtagactttatagacattgtgtacttagacgacaatacatttttatttttattattatttttgagacagaatcttgctctgttgcccagactagagtgcagtggtgcaatcttggcttcctgcaacctcctccacctcctggttcaagcagttctgcctcagcttcccaagtgtctgggattacaggcatgcaccaccatgccccgctaatttttgtatttttagtagagaacggggtcttaccatgttggccaggctggtctcaaactcccgacctcaagtgagccactcgctttggcctcccaaagtgctgggattacaggcatgagccaccgtgcccggctggacaaaattaaatttatagaaatttttctttaatatattaaccttagctgaccattttttactttataagcttgtatttttaaaaactttttgacttttgtaataatgttttgcttaaaacattgtacaactgtacaaaaatattttttatatcctaacttcttaaattttttttgttaaaaactaagatacacacatttgtctaggccggcacaggatcaggataatgtcattttattccaccttcacaacctgttccagaagatcttctgggacagtaacacacatggagctgtcatctaaaataacaatgcctttttctggaatacctcctgaaggacctgcccgaggctgtgttacagtttgtgtgtatgtacacctgtatatttatagacatacacacaactccatatatactctactgttggagaacacctaatgataaaaagtgtagtatgctaagaacataagctagtaactcgtaagttttatctactgtacattattgtatatgttatacttctatatgactggcctcacagtaggtttgtttataccagcatcaccatgaatatgtgattaatatattgccttactactgctatcatgtcattaggcaataagcatttttcagcttcattgtaattttatggaaccactgtcatgaatgtggcccattgttgactgaaaagtgaggtgcatgattatatatgtatgtgccacttttcctttcattagtggacatttgggttgtttccactcagctgttgttaatagcagatgagcatgaatgtacaaatgtttctttgaggctgtgctttaaattccttttgaggatttactcagaagtagaattggtgctttctatgttttttttttgtttgtttgtttgtttgtttgttttttgagacgggagtctcgctctgtcgccaggctggagtacagtggcctgatctcagctcactgcagcctctgcctccggggttcaagcagttctcctgcctcagcctcccaagtagctgggactacaggcatgcaccaccatgcccagataatttttgtatgtttagttgagacggggtttcaccgtgttggcaaggatggtctcaatctcgacctcatgatccactcacctgtccccctatgttcatttaaaaaatatttttaattttttaaatttctgactcacaatgttcccattctatgttaattctgttttaaaatttttgaggactcttctatagcagctgcatcattttttaatttaactttattattaatttttttttttagtagttttactgggttgagttttttttttttctttagggttatttggttttgagatgtaggagttttttagtatatgtggggacttcagaaagtttgtggaaacatgaaagtaaaggatacaaaaagaaaacaagttttatttctcaacataagctccatcaagttcaagacaattttataagtgatgataccaggcatttagtccatccctaaagaagtgaggttcctgggaatttaaccttgtctatgcaatcttttttaatattaactaaagaaaaatgggtgccctttaaagattttttaaaagtaggaaacaagaagtcagaaggagccaaatccggactgtaaggtggatgccttagggttatcagaattcttgtaaagttgcagttatttgatgagaggaatgagcaggagcattgaagtgaaggactcctggtgaagctttcccatgggttttctgctaaagctttagctaactttctcaaaacactctcattgcgggcgccgtggctcacgtctgtaatcccagcaatttgggaggccgagttgggcggatcatctgagctcaggagtttgagaccagcctgaccaacatggagaaacccccctctctactaaaaaatacaaaaattagcctggcgaggtggtgcatgcctgtaatcccagctactcaggaggctgaggcaggagaatcgcttgaacccgggaggcggaggtggcagtgagccgagatcacaccattgcactccagcctgggcaacaagagtgaaactccatctcaaatagtaattaataataaagccatgtttcatctgtacaattcttcaaagaaatgcttcagcatcttgatcctacttgtttaacatttacattgaaggttctgctcttgtctgcagctgatctggattcagtggctttggcacccattgagtggaaagttcgcacaactttaatttttcagtcagaattgtgtaagctgaaccaattcagatgtctgtggtgtcagttactgtttctgctgttaatcatcagtcttcttcaataaggtcatgagcaagatgaatttcttcctcgcaaattgttattaatggtttgccattgtgggctgcgtggtcaacatcatctcatctcttcttaaaacgttatcaggccgggcgcggtggctcacgcctgtaatcccagcactttgggaggccgaggctggtggatcatgaggtcaggagatcgagactatcctggctaacacagtgaaaccccgtctctactaaaaatacaaaaaattagccgggcgtggtggcgggcgcctgtactcccagctactccggaggctgaggcaggagaatggcgtgaacccgggaggcggaggttgcagtgagtggagatcgtgccactgcactccagcatgggcgacagagtgagactccgtctaaaaaaaaagaaaacaggttatcagtttgtaaactctgatttctctgggtcattgtgcccataaacttttctttttcttttttttgagacggagtctcactctgtcgtctgggctggagtgcagtggcgcgatctcagctcactgcaacctccgtttcctgggttcaagcgattcttctgcttcagcctcctgtgtagctgggattacaggcatgcgccaccacgcccggctaatttttgtatttttagtagtgatggggtttcaccatattggtcagaatggtcttgaactcctgaccttgtgatccgcccaaactcggcctcccaaagtgctgggattacaggcgcgagccaccgcacccggccggttttaccatttttagagccaagctttactatatatttgatatttgttctttcttcaaccttagctgaattcacattcctctgatagaaggtgttttcaaactgatgccgttcttagtgcctcaaactagatcctgttcatacttgttagaacaagttattacaaattcactttggtgtaaaaaattgaaatccatacataatttttttttttttttttgacagagtctcactaacgctaggttggagtgcagtggcatgatctcggctcattgcaacctccgcctcctgggttcaagcaattctcctgcctcagcctcttgagtagctgggattacaggtgcccacaatcacgcccagctaatttttgtatttttagtagagatgggttttcactctgttggccaggctgctctcgaactcctgacctcaggtgatccacctgcctgggcctcacaaagtgctgtgattacaggcttaagccaccacccctggccaattttttcataatatacatttttttctcatttttcatgaaacttttgaagacccctcatattctagatattccttctcagatatgtggttttcaaatactttctcccattgagtctttttccttttcactctgtccattatgtccttttttacacaggaattttgaatttaaatggagtctaatatatctgttttataagtctttgatgcatttgagttcattttagcaacttaattcttttgcgtgtggatatccagttttttttttttaacatcaaaagaataatgtttttgcctagcattaaggcccttggtagaggcttgtcagttacaattttggagcagcagattaagtccacactcccaaccattttccttatcaggctctcaaactctgggccacaatatgtaagacccaatcaccccaggatcaggaatcagatatctagggacagcttctgtgcccaggagcttgtaaaattattccattggtcaatgcacaggggtccctgaaaacctagctaaccccaatttacatggcacacacaagctgccccctaagctccagcttgctgttatcttgggttccctcataactcttgcagccctgcctatgtccttaggtttcaagctgtaagtagcaaagtggtctacattttatgattatcattgtgacatgtcctgacatcagaaaaacacctttgtatgttattactatacaaccagcagaatattatgagtgcagcaaatgttagaaagtattcagcctaacttcactgagcaagagtaagttcatcctggagaaagtccttaggaatgcaggcaatatactttttttcctttgtcaacaggtcaaaaacagcaaagctctatcgagcttgtcttactcaccctatttttttgttgctctgttttgttttaggcttttagcctgaagccatggttttgtttctgtctctagtggtaggtggacaagaggaatgagatgagaaaggagctttactggcccagctagaaacaaactaagaacccatgactgtattctttcccttggatgaccctgtgttagcttgttgagggagatctcagcctgaaattgaatctcacatccaaacatccacgcaagggagatttgttgtaattgtcagatatatggtaaatttttgtgaatgatgttgcactttctgaccctgcctggggcctttccagagttaagttgctgaaagtgtgcattacagaagactcctgctattagctgtcatggtgccacaatgtgcatcaccttagtcaccttaaattacttagagagtgataaggtctggacttctggttaaatgtttttaaaaaatggggggtgggggggtggtgcatagattgctgtgttctctacctttatctggaatattcagtcatttgttccctttgggggcctcattcccagtcccctgactggtttgggtgtggacatcacccagctttggacagagaacacacgccaacttcagctggcagcttgtagagatttccttttttcagaggtattattagttgtctgatactgataatgttgatgataaattttctaccttccaagcttcccaacccagtcaatttccacctaagcattgctgttttcttctgatgataaaggtcatattgtttaagctacatttactcttggggttctcttcactgtgtgctgcgggttgagaacaaaattaggctttgccagaatgaaaaagtgaatggtttttggggccttcaactttttgtgctcttgaagaaataagaagacaaaatagctttcaatccacatcaggcccaatttgcattgcttcgggagttcctgggaaagtgacggacttctatccaaaatcgcgccgtgaatttgattattggtagttctacagtcagcttgagggttgttggtttgacagttgtcagagcatgttgcagctgtatgaggtgggtatctgtacatatggatgtcccatattctccagcattgcataggaatagctggtgtctagatcctgcctcaggagctatgtgtcctgaatttaaaaatcaggtatgttatatccctggggcatgtcagacatacaacaacagtgcattagtccattttccattgcttacaacaaaataccttaaactgggtaatttgtaaagaaaataaatttcttactgttgttttgttgtgctttcttttttttttttttttttttgtttactttgtttttagagacaggatctcactctgtcccctaagctggagtacagtggcatgatcatagctcactgccacctggaacccctgggctcaagtgatcctcctgcctcagcctctcaagtagctgggactacaggtgagcaccaccacacttggctactgttattattattttgacaagatttaatgtagaaagtatagcacctgttatctaccaggaatagatgaggatgatcaggtacatttatgtttgaatctgagcgtttaagtgtatgggaagatattagacactacctttcctcataagacactcagtgatctgaattgaggaacttctagtttttgctctcccacttcttggaaacccctatctactttcctatgtatttgactacttgaggtagcttatacaagtagaatcatacaaatgtattgttttgtgactagcttacttcacttacaataagtcctcaagttcttccatgttgctgtgtgtgtcaaaatttccttccttgctaaggctgaataatattccattgtatatatattttctttatccagtcattcatcaatgaatacttttttttgtgtgtgtgtgtggtagagtttcgctcttgttgcccaggctggagtgcaatggcgatctcagctcactgcaacctccacctcctgggttcaagcgattctcctgccttagcctcctgagtagctgggattacaggtgcccaccaacacgcctggctaattttttgtatttttagtagagatggggttttgccatattggccgggctggtctcgaactcctgacctcaggtgatctgcctgcctcggcctcccaaagtactgggattacaggcgtgagccactgcacccagccacatcaatcaacactttgattgtctccacattctggctactgtgaacatgggtgtggaactatcttcatgaagccctactttaatttctttttgtatatacccagaagtaaaattgctggatcacatataattctattttaaaattttttcttagttttaaattatcttttggagacagggtattgctctgtacccaggctggagtaagtggcacagtcacagttcactgcatccttgacatcctgggctcaagagatcctcctgcctcagatttccaagtagctaggactaaaagtgtgccaccaccatgcctggtgaattttttttattttttattttttgaggcaggtcttcctctggcactcaggctggagtggtgcagtggtgtaatctcagcttaccacagtccaataccaggttcaagtgatcctcctacctcagcctcctgagtagctgagaccacaggtgcacagccaccatggtggctgcatcattttacattcttatcaaaaggcacatgtttctaatttttccacatccttgacaacacttgttgtgttcttctgtttcttttaattgtagctactctgttcgaatggattttgattgaaaacatttgaggtatggcttttaggagacttgatcttaatttcctagcctttttgacctatagttttattgtggtttattgtggaaaaaggtgccctgtagctgcctatccaggtcagtctaatcacctttcatcattcaggatttatcatctgaggttcacaccaacatgtatacaagtggcatgtcttagtctgttttgtgcttctataacagaataccacaggctgggtaatttacaaagaagagacatttattggctcgtagtttggaggctgggaagtccaataccaagatactagcatctggtgagggccttctcgctgcatcataacatgacagaagccatcaaatggtagaagagcaaagagacagcaagagggaataagaacccattcttgcgatgatagcattagtccacctatgagggtggagccctcatgatctgaagcctcttaaaggttccacctcttaatattgttacagtggcaattagatttcagcatgagtttggagaagacaaaggtttaaaccataacatggtgtaagtcacataactctgggtcatatgcatatgaaagaattcgaaatttctctatgaacacatgctagtcttatttgggtttagagaaatctttagttgcagctgttaattcatcctgggtccaaggtttacatctgacagttgcctacatacttggctcttgaaagcatagatctttagaggtaattggcattttggaattttaggatattttttgggaaaataaagggggcctgggcaaaggatagaagagggaggaggtgcagaaggagaaagattaggcagggtacggtggctcacgcctgtaatcccagcactttgggaggccaaggtgggcagatcacgaggtcaggagattgagaccatcctggccaacatggtgaaaccccgtctttactaaaatacaaaaaattagctgggcgtgatggtgcgtgcctgtagtccctgctactcaggaggctgaggcaggggaaccacttgaacccgggaggcagagattgcagtgagccgaaattgtgccactgcactccagcctgatgacagagcaggactctgtctcaaaaaaaaaaaaaaaaaaagagaaagattagaagggtaaaggggaagtagaagagttagatataaggcagcaactagaggaataggagggggaggatattgcttaagtttgccaaattgttcaatggctttattcaaggaaatttttactgaaacaattttttattcagaaccttggagattgtacaaatacgattcattccaataaaaaactactgcttactgggcctgagaaattttgttttctttcttttctaatgcatctcttaaattaacagtttttgttttcttttcaactgaaatgttcctcctagtagccactgaaggcaaaaattatccgggtgaagttatgccacttagaaacctaaacactagaattgtgattgtaatcagagtacatataacatgcaggagactttcctggaaaggagacgatttcaatttagacgatccaataagtgctggcactgtctgagaggagtgtaatgattatgtaccttaggcctggttctacagcatgataggtggctacttccccacaagaacacgacaatcttcacacctcagcatgcagaaaatctgagaatactctttctgaatgaatgcctaattctctggacaaaaaagaaaaaaaaaaaagaaaaagaagataagagaatcttatcccattttatcagtgacccaaagcaaagtctgtccaaatggtcaccagtctgttgagaatcagaaaacccttggtctgtgatattagctgaaacaagtcactagagcctatgcttgagttttttttgtttttgtttttttaacggagtttcactcttgttgcccaggctgaagtgcaatggcgtgatcttggctcactgcaacctctgcctcctggattcaagcaattctcctgcctcagcatcccgagtagctgggattataggcgcatgcctggccaattttgtattttttagtaaagatggagtttttagtaaagatggggtttctccatgctggtcaggctgatctcgaactccggacctcaggtgatctgcctgcctcggcctcccaaaaggctgggattacaggcatgagccaccgcgcccagcctatgcttgagttttaccctattattatcctcttcatgacaatgctttaagaaagtacatcactaaactgttacatataagatagcaaaaagagatgaaaagaaatggtgtgatactatcaaggatggcaatgtcacgggagccaattaaaaaaaaaaaggaggcggggcgcggtggctcacacctataatcctagcactttgggcgtctgaggcaggcagatcacctgaggtcaggagttcgaaaccagcctggccaatgtctctactaaaaatacaaaattagccaggtgtggtggcacgagcctgtagtcccagctactcgggaggctgaggcaggagaattgcttgaacctgggaggtggaggttgcagtgagctgagatcctgccattgcactgcagcctgggcaacagagtgagactctgtcttaaaaaaaaaaaaaaaaaaaaaaaggtgggggggactaaacagagtctaaatagccaagaaacccagtgcaaagacagtagtgttcaaacttgttgctaacttaacatgtcatcatggatttgacaaggtgtgaagagcaaagcataaaggacctctgtggttactatacctgtttgatgactatggcccatggtgatgaacaggttagacgttatttcactgggacctctgtaagtatgatacattgtaacataatttctacaatggtcacatctaattatatcaatcctttgttcactgcaccttcattagtaagaagtatgcttaatggtagcattcatggactgcaaacagacaacttggaaataaatgaagacccaaatgagaacaaacatagcctattaaatcagaccacaccgtagtaaaggagtcatccacaatctcttgcactcagcagagcttgaaaggcaagcagaggtgtaaaaagcttcatagtagataaaaggtaaagtattaggtatgccatgactggaggctatagtcttgaggagtgtgtgtgtgtgtgtgtgtgtgtgtgtgtgtgtgtgtgtgtgaaggggttatttagaaggttgacatcctatgtgattggctagtgatgcactgactttctccagttggtcctaagttgaacatatgggcaacaattagaaagctgtcagttcttagtcatgtcttagccattttaagcgagttgttatgtgggatgttgtctggcttcctggccttgttgctagacatagtattctgacttgggagtggttactgtagataccacattagatttctgaatgggttggtgtagattatgggtcagagtcaatttttatatttggtgtagccgttgtccatttgtatagcaaatttctcacacctaaataaggaactatccacgttagtgggatttcttatttttaactggttatgttgaaaattagtttaatattcattaatttcccacaaccctttcaaaggtttgtttttgccagaccttcagttgggcagagttaatttttccttttttttttttttttaaactggttggcaaactaaattgtaacgctttggccaaaaaatagccctttccttttctgaatataaagagaatgggttttaatttttggtcttttctttgttcttccttcactaatcctgcagaagagaccataaggcattatccaaatcttcatttgttgggggcatggttttcaggtagtattgccaccacctgatggcaatactattgctactcaatttttctctcactgctactcaattgcagtgagagaaaaatagctctaaatgccgactttttgtagtgcattgtaaaaagctgaataaagccagggacggtgtcctgtacctacagtcccagctgctctagaggctgaggtgggaagatagctttagctcaggagctgaggccttatcataaggccttataagactacctggaggcttcatctgcatgatataaccttggtcttcacaaccccttgtctttttttgtttttgagacggagtttcgctcttgttgcacgggctggagtacaatggcgagatctcggctcaccgtaacctccgcctcccgggttcaagcgattctcctgcctcagcctcccgagtagctggcattacaggcatgtgccaccatgcccgtctaattttgtatttttagtagagatggggtttctacatgttggtcaggctggtctcgaactcccaacctcaggtgatccgcccacctcggcctcccaaagtgctgggattacaggcgtgagataccacgcccggcccacaaccccttaacccagacaaccatttctactgattccaggtctttagatacaaactctttcaaccaattgccaatcggaaaatctttgaacccacctgacctggaagccccgcccctcccttccagttgcgcctttccagaggaatccaatgtacattttacatgtattgattgatgtcttacgtcttcctaaattgttaaaaccaagctgtagatgggccaccctgggcatatgttcttaggatatcttggagccgtgtcatgggccattagtcactcatatttgtctcagaataaatctcttcaactatttcacaaagttccacccttttcgtcgacagaaagatattcctccttcaactctccatcacatcctgtgtgggtcttttctttcttgtcccaacagaagcacactaacgatcaaaaaaaagtctccagagcctcagtatgtgtgtacttgacaagcacaaaagagctgaccgctatgaatggaggaccagttcattatggtcagccatgtcgcttctgatgttcttcctttcgggacttgctgtgcttcagagaatctgaaacgacaggtctctgaaatatttctcagacttgtcctagactgctctccgggaaaatctggttacttgcagtttaggagtcagcaaagcccctccacgtccttaagagccccggaactgcatttcttaacgctcctccaggagcctccagcttttttccgtaaggtccgcgcgcccagcattgtgaggcgaggcaggcagcagcgtgggaactacattacccagaagacactgcgggcgacacaggcagcaacgtgagaactacattacccagaagacactgcgggggcagggcagcgagtgtagccattggtctagcagagagacgactaatgaggtctcaattgtgtgggcgggacttctggcggcgccctcatggttgcgttagcatggctacctagggatctgttcactgatttagagggtcccagagctctgggtcgggactgaggtgaaagagcggaaaaacgcgagaagcggtgttccttctacacagaggctagagtgcggatcggctgagtcggctgcaggcgcccctgcctccgtcagcgtccaggtgaccgccgttcccgccccgctcttccctgggtggactggaggaggccgcgccgatgaacctgaccgaggtgcgtgcagcgtcccaggccgccccgcccaacccctcctcccagtgctgaagtcccaaggagccgccctgcaggttaggcccttgtgtctctaagagaggggcgttcttgtgtggggtgcccgggactgggactgcggtgcgatgaggcgggggagctcccgtcggagaccgacacgtctctggggcttggaggcactgcagaacgggcggcactggggagcccgagcgtctttgtctccaaggagcagaggttgaggcggagtctcccctggaagggcagtggagccgcagagagccatagagggctgtgcagggaggacgaatgggagggtcacgcccagagttagaagtttaaagttggggaaaacaggatgttgaacgggggcagggggaccgctgaggagaccccttgagttatggtagggctgggccagaggggttgcagtagaggggagatgtgatgagactctggatggatctcagagatagggtcaacaggatttcctgctgcatcaaacatagctgtgagggaaagtcggtagtgaatggtgtcttccataggttttgttttggcctgaaaaatctgaaagaatggaattagagatatcagcttaaggagcgggtttcagacagaagatcctgggttggattttgggcgacatcacatgggtaggtggacgtaatttccaaaggtgagggaaggtagctggcctggagctttaaatgagttagaagttgtgcacttgagaagttggcctgtggatcagattgagaaggaagaatcctacatcgttttttcatatgggctgaggtaggggagggctcagatttggaggaaagaccatggtagggagggcatctctgatactccctgcagaagggagcagatatgggctaagagtctggtctgtttctgttgaaaaagaggcctggatggataaggagttgccctggaatacagagactgaggcatgagataattgtagtcactccacccttctaactcagctggccctgagggccactctttagggaacaagataaggccatgcagcaactgggtccaaaactgggcagggctttctcacatcctccaccacagttaagggcctccagcaagctccctttactgcattatatggcaggctgacctgtttgctgaacggaccagtaactgattgactgctcagccccatcctacaactcattaacttagggatgtaaaaacaggtaattgacttaaacagtaaggaactatatcaatcttaaataaccaagcaagtcagaatctagtttaaagagagtttattcaagttcacatgttgatgatagccatctgggaccatagattcaagttgtcctgaatatacacttcaattaccacagtgacaagtgtttgctttttttttaaggaaaaaagaagcagtttctgagttgtttaccaataacttatgttaaaataagataagtttttattggctatacattcttatttatattatagattacagaaacatgaagataataggtgagacagctagtcaggaacagaatgtcttaaaacagttgtcctcaggcataggttcagggatgtgactgacatctcatatattcttgcctctctgagcctgatacattttgtgtaggtcagacaggtctgggctatttttttttttcctcagccaatatccttctaaatatgtacacataggcaattggaaatagatgtaatcaataatttaaatgtattaaaatatttattgttagaatgttaatttacctgtaactctgcttatagtacaaagctttatatatatatcacatttccttaaaacattaagaagtgtgggctgggcacagtggctcatgcctgtaatcccagcactttgggaagcgaaggtgggcggatcacgaggtcaggagtttgagaccagcctggccaacatggtgaaactctgtctctactaaaaatacaaaaattacctgggcgtggtggcgggcgcctgtaatcccagctacttaggaggctgaggcaggagaatcgtttgaacccgggaggtggaggttccagtgagctgagattgtgccattgcactgcagcctgggcaacagggcgagacactgtctcaaaaaaaaaaaaaaaaaagggaaaaatactcaaattttcaaaacccttctactttgtgctgaaaacatgtacaaaaccattaatcctatagaaagtaatgcttatacatagtgtgtactacttatgcttcttgtcaatatgagccctgtgaagtgggaacccttttaatctccattttacacataagggcactgaggcttagggaggttcagtccttgtccaaagacacagagctgctaagaggcagcactgaacttaggacttgctgtagcttcagattactttgctccagtacagggcagagatggttgtacagctcagcctgtaggatgccacagtactgtcctgatactcatggcttgcttcttcctgttacaggccgaaagaatgagggtcgtgatcaactcagtatgccactggaggctatatgagtaaacagcaaactgtttctcatgaaagcaggatgttggcaaactgacaaactgcgtctgccacccagaaggaatgctgaaggcagtcacgacccaggcacaagtgtttcttgtgattaggcataattgaagcctgttaacaataatgtgaacttgtgatcaattaagcagctgaccagtcgttacctcctcctccctttcatcctacccaataaatgtggagggctgtggaagctcaggggctgcctttgctcactagaagcagggagctctcttcttccccagttcgccttctttaaaacagtttctttcgtcttaagttttcatttctacgttcgtcccccttcattcagtctcgtaatgatggtctcaagtagtaacagtaactgtcgtagtgatggtctcaagtagtaactgtacaagtctgccacatcttcccacagggtccattgcagtggcagcaatgcataaggaccctgcacaggtaagtcaaggatttctcaggctctctaccccaggcccccaccacttatctctccgttattttaggcatcctgatatagggaaaggtggtgtcctgaaacttcatgtttttcccttccttgggtctgaagactgtggttccacgacaaccaggagtcagaactcagcctctggttatagagtggtcctagttccgacaactgatgggataagatgtggcagggcgttcaggcacgggatatagaaagttcaaatgcttactggtgcgacttagctgggatgtttagtgaactgaaaatccatgttgtatctggtcgtgatagagtatggcagcagggtaggaggttggggcatacagggcatgcgggatcggcatggaatggcagtctaaggttctgggcctttcatctgagggcgatggtaactagggaaggtttgaggaggggggaaaaagaggtgacctgacccaggttttagtggctccctctgcctgcagaatggaagaccacgtgcaggtgagggtggagccaccgatacctgggtgatgggtccagcaacagcccaggtggaggttgttggtgactgaacgagagtggcggtggtggaagtgggaggagtggggggcttctgtatgtgtttgatctagagctgcctgtattttataacgtagagagcaaggaagcttgggagctgagatggaagagggggtcaggaatggccccacagttttggccttatttggaaggatggatgtcccagcaactaagatgtagtaagttctgtagtagggggagtgtttatatagtagagcatatgaggaaccaagttttggccaagtcaaaaatgttccagtggccaggcatggtggatcacacctgtaatcccagcactttgggaggcagaggtgggaagattgcttgaggccagcctgggcaacatagggagactctgtccctacaaataataataaatagctgggtgtggtggcgtctctctgtggtctcagctaatcggcgtgctgaggcaggagggtcacctgagcctgggaagtaaaggctgcagtgagccatgattgtgcccctgcactccagcctgggcaacagagtaagacaaacaaaaacaaaaatccaagccaaaacaaaaacaaaaatacacaaaaaatgtttcagagactttgagtggaggtgccaggctggcagttgtacacacaggaatggagttcattggaggtgttcaggaaggagacatccactacatgatagctgaactgttgtgaaactgggtcagatttaggaagcaatggtgttagtaggaaggaaggagaaggaacagactgaggactgggtgtctccactgggcacctggatggtgttggtgggtgtcacaaagacagatgagagagtggatcgactgagggtatgtgtgtgtatgtttgtgtgttatgttgggggcagcctgtggagtataaggaagggcttttgaggggagagtggccatgagatggatggtgaggcatctccacaaactcaccagggtttcatggtgagtcttgcttggacctgggtagtttcatgcaaactgtgagactactttaggggaagatgggatcagcaaggagcattgctaggcctggggtggggatagcattggggaggtcagtgtatctgggctttggattaggattagggggatagagaatgttgtgactgcttatgggaaaacatgtacattgcaaaagggggagacagccaagatctggaactcagaggaggtatgcaagaactgtgaggttgtcacttgggttttgggggggctgaggttaaaccagaaaacaggactgggaagggagaccttcagaacagggctcggtgctgccccaggcgctagggaacattatattctgggcagcccaggagcaaatagggttctggtgcactgcaggactccatgtacagagtggcatcttgggaggccatggaaatgctcctggttgggccagggctgctgttagtattgcaagagtggaggcattagatacatgagagaggtactgtccaaagcgagatgcgaaggtgaggaggagcatgaatgcgtggtcccagccctggcaatgggcacgtaagggagaagagtgagcctgagtttgggtgtctgggaggcaagatctggagaccccaaggaaatggggtgacaaaagaaggtagggccggccgggcgcagtggctcatgtctgtaatcccagcactttgggagaccaaggcaggtggatcacgaggtcaggagttcgagacccgcctgcccaacatggggaaaccccgtctctactaaaaatacaaaaattagccgggagtggtggcaggtgcctgtaatcccagctactcaggaggctgaggcaggagaattgcttgaacctgggaggcagaagttgcagtgagccactgcactccagcctgggtgacagagcaagactcttgtctcaaaaaaaaaaaaaaaaaaaaaaagagggtagggcgccctgggctaggcattgatgatgcttttgctttctccccacccatctttgtgctgtgctggactcagcaatcagtagcagtgggggcgagagaagtgcgaatgctaccaggatgtggagtctcttcctccttgggaagtgggtggaggctaagcaggggatggatgtgtgtgggtactggggaagcactgaagattctggagagggaagtgtatcagtgattgacccgctggattttcatttttggaaaagagtgagtgatgacagagaggctaatggcattgaaataattttaattactttcatttccttagtgcagggggaatgccgtgctgcaccaggccacgggaaatactagatttggttaggaggcagaggcatgactgaagggaaagcatatatcagagactgtattggggttttggcaggaaaggcatgcagggtgggatgaggagcttaaaactcagtggtttgcataagtctggcagccttagggctaagagattatcccttattgtgtggtgacagggcttgtgttgattaggacaggagaaataatcatgtatgagcattagatagtggttcagcatatgggatctggatcgcaagggaaatgtaaaaacattggctgttagtttggccctccaattcttagattttaagtagataaatacagatctaaggaaacacagaataagaagttgttcatagactgaagtgtcataattttggcaggattgtatggtctttgaggatgtggccatatatttctcccaagaggaatgggggatccttaatgatgctcagagacacctgcacagcaatgtgatgttggagaactttgcgcttttgtcatcagtaggtaaggccttcatacctactctggtgtcttgtgctgggtgctgtttttttgctcttttccatgacaactctgtctttcccacaccagattgtgagtgctacgtcctgtcctctcctggtttcctggcaaatgtgataaggcagccagagctgggctgtgtatactgtaccacctccccttaagcagccccagcttctgttgctctgaaactttacaagataaggctcggaagtcagaaatcttcaggtttctttaagatatcctaatggcggtgcctgtccctggtttgattactctgtccaaatgtgtgaaacctctgtccaagggtttccctgttccccttgctgacatacttggagacagtgtctgtgctaggaatttcaggcacctccctggtcaccacttgtgaggattgtgaagttatttctgcaggacgctctactgggtgttctggtagctttagaatgcagcatgtcctgggtttattgctctgtgtacatgctgtcccctccctttccctgcctttcccgtagctggacttatgccgcagctagatagttgctcaccttgagcaagggggaggtctctgggtgcctggcagagtggatagtcctctattaatggcaagagacactcagaaggacttggccctggtgggtgaaagctgggaaaggatgtgatatcaaggctgggttcaaatcacattgagaacttaccttgtgaccactattgtttgatgcagggccactggccactcgtcactcttcctttccttccctgttgttatttttactctgacttctgacccctggcttccacctctgacccctcctctccagccttcatctctccaccattctcttccacctctccctttgcagtgctgtctaatgtatgacctgtactttaggtgttatgaggtctgcgtgtatccttcagtagtccatgaatactcgctctcacacaatcagatctctctggatctggacacaaccgtcatggcctgttgaaagccatttatagaggagtgagttggagaccccacctgccctccctgcatggtacttctcccttgtgtccttaccaccaggattcccccactacacacacttcacaggcccacctctgaacactgggccttcctctcactggccttatttccttgcctgtgaccagtcctgtgccctcatttgtgggtgtgtctcacagacatttgtgatggggctgtctcctccctccggagttcacgtgcacttcaccagcatttctgttcttacaggttgttggcatggagccaaggatgaggaggtaccttccaagcagtgtgtttctgtaagagtgttacaggtcacaattccaaagccagctttgtccaccctgaaggcccagccctgcaagatgtgtagctcaattctgaaggacattctgcacctggctgagcacgatggaacacaccctgagcaagggctgtacacatgtgcagcagagcatgacctgcaccaaaaggagcagattagagagaagctcaccagaagtgatgagtggaggccttcatttgtgaaccacagtgctcacgtgggagagaggaacttcacatgcacgcagggtggcaaggattttactgccagctcagaccttctccagcaacaggtcttaaacagtgggtggaagctgtacagggatacccaggatggggaagcctttcaaggtgaacagaatgatttcaactccagccaaggtgggaaagacttttgccaccaacatgggctgtttgagcaccaaaaaacccataatggggagaggccttatgagttcagtgaatgtggggaattgtttaggtacaactccaaccttattaaatatcagcaaaatcatgctggagaaaggccttatgagggcactgaatatggaaagacctttattagaaagtccaacctagttcagcaccagaaaattcacagtgaaggctttctttcaaaaaggtctgaccccattgaacatcaggagattctcagtagaccaacaccttatgaatgcacccagtgtgggaaggcctttcttacacaggctcatctggttggtcaccagaaaacccatactggagaacagccctatgaatgcaacaagtgtgggaagttttttatgtataactccaaactcatcagacatcagaaagttcacactggggagaggcgttacgagtgcagtgaatgtgggaaattgtttatggacagcttcacactcggtagacatcagagagttcatactggagaaaggccttttgaatgcagcatatgtggaaaattctttagtcaccgctccacactcaatatgcaccagagagttcatgctggcaaaaggctttataagtgtagcgaatgtgggaaagcctttagcctcaaacataatgttgttcagcatctgaaaattcatactggagaacggccttatgagtgcactgaatgtgagaaggcctttgttagaaagtcccacctagttcagcaccagaaaatccacactgatgcattttcaaaaaggtctgacctcattcaacacaagaggattgacattaggccaaggccttatacatgcagtgaatgtgggaaggccttccttacacaggctcatctggttggtcaccagaaaatccatactggagaacggccttatgaatgcactcaatgtgcgaaggcctttgttagaaagtcccacctagttcagcatgagaaaatccacactgatgcattttcaaaaaggtctgacctcattcaacacaagaggattgacctcaggccaaggccttatgtgtgtagtgaatgtgggaaggccttccttacacaggctcatctagatggtcaccagaaaatccagactggagaacggcgttatgaatgcaatgaatgtgggaaattctttttggacagctacaaacttgttattcatcagagaattcacactggagaaaagccttataaatgcagcaaatgtgggaaattctttagatatcgctgtacactgagtagacatcagaaagttcacactggagaaagaccttatgagtgtagtgaatgtgggaaattttttagagatagctacaaactcattattcatcagagagttcatactggagaaaagccttatgaatgcagcaactgtgggaagtttcttagataccgctctacattcattaaacatcataaagtttgcactggggagaagcctcatgagtgcagtaaatgtagggaattgtttaggactaaatcgagccttattatacatcagcagtctcacactggagaaagtccttttaagttaagggaatgtgggaaagacttcaacaaatgtaatactggtcagcgccaaaaaactcacactggagaaaggtcttatgagtgtggtgaatccagcaaagtgtttaaatacaactccagcctcattaaacatcagataattcatactggaaaaaggccttagtggagtgaatgcaggaaagtcaccaaaactgtcacctcattcagcaccaaaaggttcacatcggaccaagaacctattaatatatgtaaatctaatgttgaaagagttcagatggaaatctgcgaggatttcctgctgggaactacattaaaaacatttatgtccaggcgtggtggctcacgcctgtaatcccagcactttgggaggcagaggtgggtggatcacctgaggtcaggagtttgagaccagccgggccaacatggtgaagccccatctctactaaaaatacaaaaattagctgggcatggtggcaggtgcctgtaatcccagctattcaggggactgaggcagggagcatcacttgaacctgggaggcggaggttgcagtgaactgagattgttccattgcactccagcctgggtgacagggcgagactctgtctcaaaaagaaaaaaattataattgtggcaaattacaggtaacttaaaatctaccatcttaacccatatttaactgtactgttcagtagtgttaagtcattcgcattgttgtcaattaatatccagaagttttttcaacttaatgaaactaaaacattataccctttaaaccaggggtccacaacccccaggctgcaaactggtaccagtctgtggcctgttaggaaccgggccagcatcactacctgagcttcacctcctgtcagatgagcagcattagattctcatagcagcctgagccctattgtgaactgtgcctgtgagggatctaggttgtgtgctccttatgagaatctaactaatacctgatgatctgaggtgggacagttttattctgaaactgtctgccccctcctctgtccctgatgcgtggaaaaattggcttccatgaaaccagtccctggtgccaaagaggttggggaccgctgctttaaactactcctcttcctcattccctacgccaaccagcccctgacaatactactgtatgaattttactataaatatctcatatgaggaaacttaagttttagtcttttgtgacttattttgaggcttatttccctaaatgtcttcaaggtttatccatgttgtagcatagcttatgattttcatcttttttaaaggccgaataaaatcccattgtagtcatgtgtcgcctaacaagaggactgtgttctgagtaatcatcttaaggtgattttgtcattgtgtgaacaaagagtgtacttacacaaacctgaagggcacagcctattacgcacctaggctatatgatatggtccattgcgcctcagatataaaccttaacagcatgttacagtattgaatattgtaggtaattgaaacacaatgataagtaaatgtgtatctaaacatatctaagtttccaaaaggtactgtaaaaatgtatgaaaaatggtaaaaactttatagggcactaacatgaacgaagcttgcgggacccctctggttgagtcagggagtgagttgtgagtgaatgtgaagctctaggacattactgtaccctattgtagatgttataaacattgtacacttaggctactctaaattaattttttctttagtaataaattaaccttagtctactgtaacgtttttacttcatgaacttttaaaattttaaaaagctttttgactcttttgtaataatagcttaaaacacaaacacattatacagcctgtatagaagtactcctttatattctataaactttttctatttaattttttaacttcgtaaaaaataagttaaaaatgaagacacagacacacacattagtcaaggcctacagagggtgaggatcattaatatcactgtcttttgcctccacatcttgtcccactagaaggttttcaggctcaataacagggagttgttatctcctatgataacaatattctggaatattttctgaagccttgcctcacactttttttttttttttttttttgagacagagtctcgcactgttgccaggctggagtgcagtggcacaatctcggctcactgcaacctctgcctcctgggttcaagtgattctcctgcttcagcctcccgagtagctaggattacaggtgcctgccaccacgctcagctaattttttgtatttttagtagagatggcgtttcactatgttggccaggctggtctcgaactcctgacctcatgattcgcccgcctcagcctcccagagtgctgggatgacaggcatgagccaccgcgcctggctttattttttttttgagacagagtcttgcactgttgcctgggctggtgtgtagtggtgtgatcttggctcactgcaacctccgcctcccgggtacaagcgattctcctgcctcagcctcccgagtagctaggattacaggtgcccaccagcatgcccggctaattttttgtatttttagtagagatggggtttcactatgttggccaggctggtctccaactcctgacctcatgatccgcccatctcggcctcccaaagtgctgggattacaggcatgagccacagcgcccggcctgtgctctttatatgactggcagaccagtaggtttgtttacaccagtgtcaccacacacacttgagtaatgggattgagttacagtggctgtggtggcactaggtgataggagttgtttagctctgttataatacgggattactgttatacatgtggtccatggtagacagaaatgtgtggcatatgactgtggtatatgtatatgccacttttcctgtattctttcttcagtgtacatttgggttgcttccactcttctgttcttgttaatgccactatgagcatgaatatacaaatacctcctgaggccctgctttaaattcttcttggacatatacccagaagtggaaatggtgcttcccgttaataataataattataataataataattattattattattttgagacggagtcttgctctgtcacccaggctggagttcagtggcacaatctcggctcactgcaagctccgcctcccgggttcacgccattctcctgcctcagcctcccaagtagctgggactacaggtgcccgccaccacgcccggctaattttttgtatttttagtagagacggggtttcaccgtgttagccaggatggtcttgatcttcctgactttgtgatccatccgcctcagcctcccaaagtgctgggattacaggcgtgagccaccacgcctggccacttcccgttaattctattttaaattgtggggggaattattttccatagcagctgcaccattttacattctcaccagtgcaggggttctagtttttcacattattgccaacactttgttttttaatcatgatgggtgtaagatgttattttattatggttttttaatttgcatttcagtattggtgttgagcatcttttcatttgcttgttgactaattgtataggttctttggagaaatatctgttaaatgtctttgcccattgaagaaagtttttgtaaattttcagataacattgtatgcttttgttgtgtacaacatgatgtgaagtatatatactttgttgagtggttaacatgtacgtattatatatgtacatattctgtatacgtattttaaatattaaccccttgcagatatgtgtttttcaaatactgtctaccattcagtctgcttccttttcattctgttcatgtcttttttttttttttttgcacaggagttttcaaatttcaatggagtccaatatatgttatgtttgtttcctatgcttttggtattatacccaagaaattattgctaaatccagtgtcatgaaccttttttcatgttattttctaggagttttatagttttaagttgtacttttatgtctgatttatttcagtttgttttagtaaatggaggaaggtaagagttcaacttcattcttttgcatatagatatccagctttttgaaagtcatttgttgaaaagactccttaataagtttttgcgctcttgtcaaaaatctgagcataagtatgaggacttccgtctggcctctttattccactatatgtatgcatttgtgctagtaccaaggtgttttgatacataattcttttaaaagaataatgtttctgtccactgttgaggcccttgctagaggcttgacagtgctacatttggaacagctgattaagtacacttccaaccactttccttaacaggctgtcaaactctgggtcaatatatatcagccccagtcaccccaggagcaggtatcagacatctggggacaactcctatgccctgaaatgtgtaaaattactcaaattggccaagtatagaaagcccagaaaatctagctaacccgaatccacttgccacacacaagctgcctcctacaactccagtttgctgtattactatctatattccttcacaactccggtgcagccctgaatcatgtcctctggttctgagttgtaagttacaacatgctccacctttcatctatctgtcatgtcatgtcctgacatcaagaaaacttctaaatcttaaaactacatacccagaagggtatcatgagtgcagcgaatgttggaaagtcttcagccattaacctcattcagcaccagtaaaccatcttggagaaagaccttaggaatgcaggcaggcaaagtgcttttgccagcagataaaatagtaaagctgtggatattagcttttgtgagggagacctcaaccagaaatggaatcttacatccaaacatccacacaagggaggtttgttgtaattgtctgctatatgagaagcttttgtgaattaccttgcactttctgacctgcctgggatccttgccagtgttaagtcactgaaagtgtgtactacaaaagacttccatccactattagctgatatcacagtgtgtatcaccttaaaatgcttagggagggcagatagctgtgctctctacctttatctggagttattgagtctgatcccttcgggcgaggcctcattcccacttccatggctggtttgggtgcagacatcatccaactttggacagaggatacaggctggcttgagctggcagcttgtaaagattttcctttcttcatgggtattattgcttgtcttataatgttggtgatagatttttcaccttccaagctgcccaaacccagtcaatttccacgtgactatactggttttagtgatgataaagtcattgtttaagctacatttactcattgcagttttattctctgtgtgctgtgggttgagagcaaaattggagtctgccaaaatgaaaaagtgagtggttttgtgaggttttcaattttatgtacttccaaggaaatagcaaaaacaaaaaaaccaaaaaaaaaaaaaaaaaaacaactcaatccacaaacgcctgatgtatattgcttcagaaggttcctgggaaaaagaaggatttctatccaaaatcctttaccctgaatttgaagattatttatggttgcacagtcagcttgcagccaggacaattggtttgacaactgtcaggatttatggcagctgtgagagctgggtatttgtacccatgcatgtcccatattctccagtattgtttagggatagcttgctcctgtgatgtgccttatgagctatgtgtcttgaacccaaaaatgatgtaggttatgttcctggatgtaaaatgtaagagtgcattagtttgttgtccattgcttataaaataatacctgaaactgggttatttataaagaaaaatctatttcttacagttatggaggttgaaaggtccaaggttgagtggccgcatttggtaagagccttcttgctggtagactgtgcaaaaagtcccaaggtggtacagggcatcacatggtgaggctgctgagtgtgctcacatgttaacgtgctagcgcaaatcattctctctcttttttttttttttttttgagacggagtttcgctcttatcgcccaggctggagtgcaatggcgcgatcttggctcactgcacctccgcttcctgggttggctcaccgcaacctctgcctcccgggttcaagcaattcttctgtctcagcctcttgagtagctgggattacaggcatgtgccaccacaccccgctaagtttttatttttagtagagcagggtttctcccatgttgatcaggctggtctcgaactcctgacctcaggtgatctgcccgccttggccccccaaagtgctgggattacaggcaagagccacggcccctggccctttctcttcttataaaaccaccagttctcccaggataacccattagtctatcaacccataaattgattaattcattcctgaggatagagccctcatgattcaatcacctcttaaaggtcgcacctctcagtactaccacactgtagattaagcttcaatgtgacttttggaggagatggtcaaaccatagcaagcagtttgggaaccatagtctgtacagaaacagtgattgtattaatatgaagtatgagacaccagcaaactagagtggaatggatgagcgccttgtaaagagacatccatgaatgtttcagtaactatggctatgtgagatgagggtatacagaaactctgaggacctacagacgtgtgtatctcctgtaggcaaagtcattgtcagagcaagtaatccaaaggtgttatggattcttgtgtctctggcgttataaaacgtatgttgaattttaattgccattttaacagtgtggagaaatgggacctttaagaggtgattaggtcatgatggctctgcccttataaaggaatcaatgcctttatcataagagtgggtttgttaacccgagagtgacgtttttataaaatcagctgtctctgtctttcatgctcacttgcccttctgtcatattatgacagagtaacaaggccctcaccagatgccaagcagataccagtgccatacccttggacttcccagcctccagaactgtatgaaacaaactactttataaattacgcaatctgtggtgttttgctatagtagtggaagacagacacagacataaagcctgttaattcaaaccactactgcacaggtaggagcctcatgactgaatgaagggagattctatacttctgagataagtcttttttttttttaaacctaaacataattcctggtgactcaggtggacataaccttccttgtctccagttcttcttccccgagattctgaatttccaacaacattgcttccagtttttgatactataaaatcagagttgacccacgtaagacatgaggagaggctaatgatggaatcaacacagctttgccagaggttataaaagaggattgagaaatccagattttatttggaatttttcttttctaacagctttattgaggtattagtgacattcagttgcacattgttaaagtgtaaaatatataaaaacaatcaccaaagtcatgataataaacatatccattgcctcaatagtttgtttgtacccttttctattctctctcgctcacagtcctacccaaatttttatgctcaggtagccactggtttactttatgtcactatatacatctttccttccttccttcctccctccctcctgctcttttctttttccttttttcttttcttttttctttgtttctttccctccctccttctcttctcctctcctctcctcctctcctcctcctctcctctcctctcttctcttctttctctttctcagaatttcactcttgttgcccaggctggagtgcaatggcacgatctcagctcaccgcaacctccaccttctgggttcaagcgattctcctgcctcagcctcctgagtagctaggattacaggcatgcgccaccacgcctggctaattttgtatttttagtagagacgggggtttctccatgttggccaggctggtctcgaacgcctgacctcaagtgatccacctgccttggcctcccaaagtgttgggattacaggcgtgagccaccatgcccggcctataaattttctagtatcttatacaaatgaaatcctacattacattcatatggagcattttttgatatttatacatgttaagcgtattcattttttgttgatgaagagtattgcattgaatataccacaatttattaatctattaataaatattttgattgtttctagtgttggactaaaaaactaacaaagacccatgaacattcatatacaagtgtttatatgaatatatttagcagaattgcatttgttatacctccttgtccatgatggttatggtgtattttaaagattaaccattttcatagatgtgttgtggtcagtgtggtttttaaatttgcatttctctaataattaatgatgctgaataagtttttatatgcttatttgttatctgtatatttggccaaatttctaaatcttttccctttttttaaaaaaaaatcttatttttctattttaatagagttttaattttagaacattttaagatgtacagagaaattgcaaatatagtacagagatatctcatttacaagcacacctagttgttactaatatatagtcatatattagtatacagcattatttacaattagtgaaacagttttgatacattattaaactaaagtacatctttgattgagatttcctcagtttttaccaaaatacatgttctgttccagaattccacctaggataccacattgcatttattttattattttttattcttttatttattttttttcatgtgtctctaaatgtaaccacattacagttagtactcacatttctttaggcttgtcttgcttatgagaatactcatttattttgatattgatttttaatttttttttttttagatagtcttgctctattgtccaggctggagtgcagaagcactttctttctttcttttttttttttttttttgagacggcgtcttgccctgtctcccaggctggagtgcagtggtgggatctcgactcactgcaacctctgcctactgggttcaaggattctcctgcctcagtctcctgagtagctgggattacaggcacctgccaccatgtctggctaatttttgtatttttaatagagatggggtttcaccatgttggccaggctggtcttgaactcctgacttcaagtgatctgcccacctcagcctctcaaagtgctggggttaccggcgtgacccacggtgcccagccacttttagttatttttatttttattttgagtctccctccgtcacccaagctggtaagtaattctcgtgcttcaccctctggagtagctgggactacaggtgtgtgccacatggttggctaatttttgtatttgagacagggtttttgccatgttggccaggctggtctcgaactcctggcctcaagtcatcttgagtggatcacttgaggcatttgggagtgcctcagcctcccaaaacggtgggattacaggcgtgagccactgtgcccggcctgcacatgtctttcttacatgtggactctccaggggatttatgctgttcaagaagcacctgaatcaaactgtgctttaaaaatatttttaaaacattccatgattcttcatagtacaaaaatgagaaatctcccctaaatctctaaagaattccctttttaaactttttgatttcctgaacttgtctgaaggacttaacacagttatatagagtgttctttgtgtaacagtatccatgactttcatttttagctctggtattagatcttcctggacaagagcattactggccatgtgtatgttgctatcacaaataactagtagttaatatttcctaaatcttagcaagagttatgataaatagctgaattccatgaagagaaaagactcatggcatgacaaccagattaggaaagagtgttttccttgtcctgcaggcaaaacagaactgagagatatgagtatcactcatgatgaggacaaaagggctgcgtgctgggaaacatgaggcgaccaacacagagttggtcactatccactggcctgggtttgcaactacagttgtccaaattgtcagaaaactatggactgaatagaaaacaaaaaaggagctcaccaggaccatgatggtgtgtgtggctctggcttcctgggaaggtctgcaggagagtctgttgctgtgattgtgttggacttgctgcttgtgtctgtagaggaagaagaccatggagccactggcccagaccatgaagcccaaactcataaaatcaggggaaaaatataagactgcatgtaatgagctaaatctctttgatgctttgtaagaacagtatccataattgttttttgcactactgtttttgctattcagtgggccattcactaatagaagaacagatgcattcatcaagacatggggggcccagcagaggagacaacagaagtcaataaaccttggggatctaatcttgatctccatccacctgcatatactggggttgagcttaatggcttggaatccattgagaaggcagatggtgctgagggaaactcttgtgcccaccctgtgataataaaagacaaacttacatccagtgtcattcagcaaatatttcaatccaaaagctgccattgtctgaggtatccctttaaagaaaaggaccatggagttagccaaggccagttggctgagaatcaagtccgtgggtctcagcttgtgtccagtgaacaaaattaagttataaaaacaaaggagaaaggaatttcccaggatcccaactccagtctgaatgaggaagctaatccctgattttacttttccaaaagccatttcatcaaaatctaggggatgttgattttcattgaggtctgaagaatcagtagaataaaaaagcagaaagaagtatcttgtcatcagtggagacagaagttttaatgtgtctccaaccatattttctcatcttaaacagaaattaagattgtccctgttcgtgcaaaggcaattgcttgtgtgtccaactgcagagaagcaggtgaatgaatgagggctcaaccgcacaacagatccacaaatcaaacctataaaactcagggcttacacacatgcaacaagtaaatacaagcaaaactagggaaatatataaaaacagaacacagaagagtcaatatcattagagtgatattatactatagtttgcaaaatgtaatcatgacggaaccctgggtaatatggacagggctttttctgtattatttcttatgactgcttgtgagtctacacttatttcaataaaaccttcaattaagtagcctggagatatgaaaagcaaaaataatacaccataaaaccttttccacactaatattttagtaaacaccattgttattgatgcattgaaacaaattttaggccgggtgcagtggctcacacctgtaattccagcacttcgggaggccaagatggagaccatcctggccaacatggtgaaaccctgtctctactaataatacaaaatactaataatacaaaaattagccgggcatggcggcgcgtgctagtcccagctactcgggaggctgaggcaggagaatcgcttgaacctgggaggcagaggttgcagtgagctgaaatcaaaccattgccctccagcctgggcgacagagcgagactctgtctcaaaaaaaaaaaaaaaagaaattaaaaaaacgctacaatacaattggtaacaaggccttcagcacagtacaaatgctaacttgaagaatttttaaaaactataatttttggaacaatcaacattgcatcatggtatattttattttaagcacatatatttctgttattttccaccggacaggtctagagattgtgaattgactccgtagaaataaccatgaccaccttgagcccacacatttttatctcaatgccatttctcacaagtaaatgcaaaagatcctgaaaataaatactaatcccagaaacacctaagatatccttaaaacttgttaaataggaaattcaatatgttccagaaagcttgggtttatttttagggaaagataattcaattgggagggaatttcattgcacaatattcatatatatcaatcacaaaagaaatagtaactgcggccaggcacggtggctcacgcttgtaatctcagcactttgggaggctgaggcgggtggattacaaggtcaggagatggagaccatcctggccaacatggtgaaaccccgtctctactaaaaatacaaaaattagctgggtgttgtggtgcgtgcctgtagtcccagctactcgggaggctgaagcctcctgggttcacgccattctcctgcctcagcctcctgagtagctgggactacaggcgcccaccaccacgcccggctagtgtgtgtgtgtgtgtgtgtgtgtgtgtgtgtgtgtttagtagagacggggttgcaccgtgttagccaggatggtctcgatctcctgacctcgtgatccgcccgcctcggcctcccaaagtgctgggattacagggatgagccacctcgcccggccataatttagattcttttggtgtctctatggaattgctatcatcagggaaaattatgaggtattttctcccatgaataactacatctctttaggggtggagcaatcaataacacagcagtatcaagattctcaggcgagaggtggctcacgcctgtaatcccagcagtttgggaggccgaggctggtggatcagctgaggtcgggagttcgagaccagcctgaccaacagggagaaaccccgtctctactaaaaatacaaaaattagtcagaggtggtggcgcatgcctgtaatcccagctactcgggaggctgaggcaggagaatcgtttgaaccccagaggcggaggttgcagtgagccgagatcatgccattgcactccagcctgagcaacaagagtgaaactcggtctcaaaaaaaaaaaaaaaaaactcaggctctgaggtatgaaaaccttttagattcccacaaaccacttgttgacaaatgtttttcctatttatatgaactcatcatttattttcaagatagttcctgattctttgctttaatctcttattttgctccattgtcctagttgtataatttatttccaatatgcatttggtttcctattttttcagcttctccttataaagtaccatttttactatgactattttgaaagcttcttgtatgtataaagttagtgtgattattgactttaacataccacctccttctcctcctagcctcagaaagaagtgttggtaactggtgagaattttcagacagattttcctttttttttttaatttaatttaatttttttttctttctttgctttcttttttttttttttttgagacagagtctcactctgttgcccaggctagagtgcagtggcgctatctcggctcactgcaaactccacctcccacgttcaagcgattcacctgcctcagcctcctgagtatctgggattacaggcgcctgccactgcgcctggctaaattttttttgtatttttagtagagatggggtttcaccatgttggcccggctggtctcgaattcctgacctcgtgatccacccaccttggcctcccaaagtgctgggattacaggcgtgagccaccgcgccaatttaatttaattttttaaagttccaggatacaggtgccggatgtgtaggtttgttacataggtaaacgtgtgccatggtggtttgctgcacctatcaacccgtcacctaggtattaagctcagcatgcgttagctatttatcctgatgtgctccatcccccgacccctttgacatattccagtgtgtgttgttcccctccctgtctccatgtgttctcatcgctcaactctcacttataagtgagaacatttggtgtttggttttctgtttctgtgttagttttctgaggataatggcttccagctccatccatatccctgcaaaggacgtgatctcattctttttatggctgcatagtattccatggtgtatatgtaccacattttctttatcactgatgggcatttgggttgattccatttctttgctattgtgaatagtgctgcaatgaacatatacatgcatgtatccttataacagaatgataataatagaatgatttatattcctttggatatatacacagtaatgggattgctgggtcaaatggtatttctggttttaggtctttgaggaattgctacactgtcttccacaatggttgaactaatttaccttcccaccaacagtggaaaagcattcctatttctccaccaccttgccagcatctgttgtttcttgacgttttaataacagcccactgaacagcaaaaaccttagtgtgaaaaacaattatggagtctgctcctgggcaatgcaagaaatatttggcaccttatatacaattatatacttttctcctgactttttgagttttggcttcttggtgtgggtcagtggctccatagtctttgtcctatacagacacaagcagcaagtccaacacatttgtagcaagagactctcctcaaatcagtataagtaaaattaggaaaatattaagatgatagtgagggccgggtgtggtggctcatgcctgtaatctcagcactttgggaggccgatgcaggcggatcacgaggtcaggagatagagaccatcctggctaacacggtgaaaccccgtctctactaaaaatacaaaaaattagccggacattgtggcgggcacctgtagtcccagctactcgggaggctgaggcaggagaatggcatgaacccaggaggtggagcttgcagtgagccgagatcgcgccactgcactccagcctgggcgacagagtgagactccatctcaaaaaaaaaaaaaaaagatgatagtgaatatatcaaaatcaatatcatcattgtgatattatactgtaattgccaaatgtaaccatgggtggaaactgggccatgtgtagaggctctctgagttattttttaaactgcttgtgagtctaaaattaaattaaaattattgttaataaaatggtcagtaaaaatgctcaggaatatgtaaggcaaaaataaggcattataaaaccttgtccgtcattatgttttaatacacatctcctcacatacttatcatttctttctgatgagaacatttaaaatctactcttttggcaattttggaatagacattaacaatagtcaccacgccgtgcaacagatcactagaacacattccttgtgtctaactgaaacttcgtatgctttcacaaaaacctcccgtttttcagtttgccctctatctctttagcctctggtaaccaccattctactctctacttttataaactcaacttgcctaaattctgcatacaagtgagaccatgaccatgtggtgttggtctttttggactttctttgaatgtgtcctgccttcagagatgtgttgacctacaagaaaaatgtattgaagcataccactataatgtgtgcacatttctgaatgtcatgtataagatacctatttttgccactcctattcagtatagtactagaggtcctagccagagaaatcaggcaagaaaaatacctagctaactaaataaaagatattcgggtgagaaaatataaagtaaaattgtttttctttgttgtaatatgatcttataaactcttagaactggggaacaaatttaatatagttgtaagacacaaaatcaatatacaaaaatcagtagcattgcggtacaccaataatgaaatagccaaaacagaaatcaagaaggcaattccatttgcaatagctataaaaagcaaaataaaataaaatagaacactgagaaatatttaatcaagaggggaaagacatcaaggaaaactacaaagcattgataaaataaactgaagaggacacaaacaaatggaaagacatcccatgctcatgtattcaaagaatacatattgttaaaataacagacagtactacccaaaacaatctaaagatttaatgcaagcccaatcaacatacaaatgccattttttcacagatatagaaaaaaattctaaaatttgtatggatcttcaaaagagcccaaatagccaaagcaatcctgagccaaaagaacaaacctggagcatcacactacctgacttcaacaccttacacagccatagtatccaaaacagcatagtattggtattttgtttttgttttttgagacggagactcgctgtgtcgcccaggctggagtgcagtggcgccacctcggctcactgcaagctccgcctcccgggttcacgccattctcctgcctcagcctccccagtagctgggactacaggcgcccgccaccacgcctggctaattttttgtatttttagtagagacggggtttcaccatattagccaggttggtcttgatctcctgacctcgtgatctgcccgtctcggcctcccaaagtgctgggattacaggcgtgagccaccgcgcccggcctaggacttctttttaacatatgtgttgagattccaatctttgtggttgctatttctttgatgattaatttatagattacaatgattattactatgcagtcaaatcacaatgtattttctatagaaattaatacaaaatatatatttaaaataaaatgagttagtttagtcttccaaaaatttttgtagtttagagattatttaaattatttgagttagcatttgtacttgctttgttctatggtgaaagctttgctaccaattacattgtaggtttatttgtttcaattcatcaatacccaatggtgtttaccaagatatgattaagacaaggttttacaatatcttattttcatcttacatatcactgggctatttaattgaaaattttattgaaataattatagattcacaagcagttgtaggaaataaaacagaaagagcctggcccatatcgcccagtttttcctcatggttacatttgcaaattatagtataatatcacaataatgttattaactttgatagatcttatatcttttaaatatttcccttgttttatttctattcctttgtgagtgtagaacccctgagttttatggattttataatttcattttaattgaacattatttaggaattatataaagtatttatgtttgtaaaaacccaaagatatatcacagaataattccatagaatcctaactttcatttctgtttccccacctgtctgtccctatatacatatgcctctgctggcttcaaataattcagcatcctttgtacactcttctgacccatgcctttttcacttaagcatatacccttaagtaaaaccatatatgcagttcaaccttaatgcaaactatgtgttcatacaaagtactgagctagactgggcgcagtggcacacgcctgtaatcccagcactttgggaggccgaggtgggcaggtcacctgtggccaggagttcgagatcagcttgaccaacacggagaaactccgtctctactaaaaatacaaaaaattatccgggcgtggtggcgcatgcctgtaatcccagctactcaggaggctgaggcaggagaatcacttgaacccgggaggcagaggttgtggtgagccgagattacaccattgcactccagcctgggcaacaagagtgcaactccacctcaaaaaaaaaaaaaaaaaaaagaatgagatcatgtcctttgcagggacatggatgaagctagaagccattatccttagcaaactaatgcaggaacagaaaaccaaacaccacatgttctcacttataagtgggagctgaacaatgagaacacatggacacagggaggggaacaatacacactggggcctgtcgagggatggggctgggggagggagagcattaggaaaaatggctaatatatgctgggcttaatacctaggtgatgggttgataggtgcagcaaatcaccatggcacatgtttacctatttaacaaacctccacattctgcacatgtaccccagaactaaaaattaaaataaaaaaaactcgttttgttgatcttttgtactttaaaatctctatttcatttatttctgctctgatctttatttccttctaccaattttgagtttaatttctttgttttagttttcttctttgttttagttttaggttttttgctttagtttcttttgggtttttttctttgttaatgtattctctgaatgatctgcccattgctgaagatgaggtgttgaagttctctggtattactgtattgaagtctatccttttgatctactaatatttgctttatgtgtttgtgcgtgccctaatgttggggtcatatatatttacaattgttacatctttctaaattgacttttttcattatataattactttctcttttttagtttttaacttgaaaaactgcattatttaaaaataattattttacctgatataaatatagctagacctgttccattttggttttcatttgcatggcatatctttttctatcccttcactctcagtctgtacatctttataggtgtagtgagttttcttgtaggcagcatatagttgggtctttttttttttcaatccattcaactactctatgtcttttagttgaagaatttcatccatttacattaaatcttatatttatagttagggacttactacttccattttgttatttgttttctaagtcttctctaattttcttactcccttttttgtggataagtgattttctctggtagtatgatttaatcctttgctttttgtttttagtatctctactataaatttttgcattatggttgccatgagacataaaaagtatcttacagttacagcaagttattttaaactgatgacaacttgactttgatcacaatgaaaagaaataagcaaagaataaactaaaaatctctacactataactcatcactccttttcttttcgttgtctcactttatatctttttatatatctcctaaaaagctattcagtcatcattcttgacagatttgtattttagtgctcacactaaagatatgaggggttcacacaccagaactacagtgttaaaatattctcaatttgtctgtgtatttacttttgccagtaagttttactccttcagatgatttcttgttgcacattagcattcttttctttcagactgatgaactctctttactatttcttgtaagacaggcctggtattgatgaattccctcagcttttgtttgctgggaaagcctttatttcgccttcatggttgaagaatatatttgatgactagaatattcttggttgaagatggttcccttcagcactttaaatacgtcttttcactttcttctggcctatgagatttctgctgagaagactgctgccaatctactggagttcctttatatgttatttgtttcttttctcttgctacctttcctctttttcatctttgacctttgagagtttgattgttatatgtcttgtgttgaatctggttggcattctttgactttcttatacctggatattcatatatatatgaatatgaatcatatatctatatgaatatatatatgaatatgaatcatatatatgaatatatatatatttggaaagtactctataattatttctttgaattaactgtctatccctacatctttctctactccctttttaaaggtaatcactcttagacttgcccttttgtggctattttctatatcttttaagcacagttcattctttttcttttttctcctctgtattttcaatagcctgtatttaagctaacaaattcttctgcttaatcaattatgctgttgttatattctgatgtatttttcagttcatccattgtctttttcagcactaggatttctgtttgatttttttttttttttttggtaattatttcaatctctttgttaaatttctctgctaaaattctgaattctttcttcatgttttcttgacattctttgagcttcttcaagacagatattttgaattccctgtctgaaaggtattccctatctgatagatctctatcactccagggctggtcactgggcagcttatttagtccatttgatgagatcatattttcttgaatgttctcaatacttgtggatatttgtacatgtctgaacactgaagagtttcttatttattccagtcttcacagtctggccttgcttgtactcattcttcttcagagggccttcaaagaattcaaaggggactgagtgctgagttccctaagctgtggtcactgcagccatttcagcactagagggtgccataatcccaagtatgcaataaatcttgcagactcctagatacccagcctagatagatgtgggaaagagaagacaatgttctgggttcccaggcaaagtcccttactctcttctctctcattccccgaagtataagaagtccctctatatataccaggctgcctgtaattgggggagacgtgacacagggactcctgtgtccatcacagctggcatcacagtaatgctagtctaaacccatggactctatgaccagcacagtactggggattgcccaaggtccacagtcagtactacctgactgccactgacgtttattcaaggcttgaggccactttagtcagcaggtggtaaaaccagccagaacttgtgtccaaccaaccaggacagcagattcccttctggcctgggttgggtctagccgcactgtccaggaagaaaggcctgggatcggtggcttcaggattctacttggcgctttattttcctatgactgagctggtactcaagttgaaaaacaaagtcatctgtactcttccctctcctttcctcaagcagaaggagtctctttctgagccacactgcctggagttgggggaggggtgtggcacactcccttggctgctacggctggtgtcatgctgggtcacatgcacccaaagtccacagccttagagaccactgcagcaccagggcttgcccaaggactgcagtccttgtgacctaactgccactcaaacttattctgggccccaggccacttcggtcagctgttggtggtgccagctgagactcaggttcctttcacgggggttgaaaggaatttgcttctggccccaggctggtgtaaatgctgtctccatgggcacaagtagaattgtgccgtgttgtgttcttctgtgcctgggcagcaccaggttccaatgcagtcccacactcacttcgtgctctcttctacaagcacacagatttttctctgcatgttggtctgccaagggatgggaaaggggtggtttaagcaatgcaagactacctttcctacccacttcaatgcctttcttcttgatattatgttaaaatcaggtactccgatcactcatctagttttctggttcttatgaatgtgctttcttgcatgagtagttgttcagctcgtgttcctgtggggagaaaattgatgaatgtttctctttggccttcttgctccactgatttttctttttctagatttttacataaattgaatgatactacatgtaatcatctgcatctggcttctttcactgagcttaaggcttttgagatttgtccatattatgtataggcatccttttatattgctggatagtgttccatttcatagagatgctacaatcgattgctgccatggacattattgtgcatacccaaaatttatatgttgaaatcctaaccccctagtacctcaaaatgtgatgtatttggaggtaggactttaaagaattaagttgaaatcagcccattaggttggaccctaatcttaccagtgtccttataagaaattaagacacacagagacaccaggggtacacatgcgtacagtgatggccttgtgaagagacagaaagagggcagccatgtgcaagccaaggagagtggcctcagagaaatccaacactgccagcatcttaatcttggactttagaattgttagaaaattaatttctgttgtttgagccacccagtctttggtattgtgttatggcagccctagaaaattaatacaattactcattcacctatggatggtcatttgagaattttttttaagtgttctagttattggttagatgtgaagtttccataccttctccccacaaagtcaaggcacatcaccctcctggtacatcaacatgttcaccaaccaggaaactccaccaagcctctgcgtcaagagttctaagttggtagggaggaacgaggagggggtatctcattttgtagctgtgattaaatcacaaccacatggctgacttcaatctctagttcctttcctctccccaaaggtcaatctggctcaaagtttcaaccctcttattacatggttggtctttctgatgaagagcccccattctgaacctttctaggagcctataatgaatcacttcgttagtataaaaaatacacttctctcactcaaagaattacaagatttttgtagtactaagcctgggacaaagatccagatatattttttattacaccacagactgtatttaatataataattaatagattttctactgttaaaccaactttaagatcctaacaaatctcaaggctgggtgcggtggctcacgcctgtaatcccagcactttgggaggccgaggcaggcaaatcatgaggtcaagagattaaggccatcctggccaacatgatgaaaccctgtgtctacaaaaaatacaaaaattagctgggcatggtggcgtgcacctgtaatcccggctactcaggatgatgaggcaggagaattgcttgaacccaggaggcggacgttacagtgagctgagatcgcgccactgcactccagcctggcaatagagggagactccgtctcaaaaaaaaaaaaaatcctaacaaatctcactagaatatgacttattctttctctctaagagatatatagatatatgtattaaatatctttagtagaggatttttcagatctcgagtgagcctggtcagttggtatctttcaatggatttttgttttccaagtttcaacttactgagaaagggttgtttaaaacaatcacacattatccattatatgtttcaaagttatctagtactatactatgtttcattgctcctatctgtaatatgtgatttacgttctttctgattaaaaaaaggagacaccttgaataaattattaaaattgatagaccttccactatatcagaaagaaaaaacatgggttcatagattttctcaaaaaagaaaaaactaaataaggttactgtgaaaattaattctgaggccctagtacaaagatggagagctcagagcccaaaagtcatcctgtgttaaggagacatagctaagagtctcggtttgccaaggtagctggagtctacagagcagagtacaggagagaaaaaacttcagagatatagagggccatccccaagtattcagctgagtataatctgtgtttgcatatagaaaaagaccagaggatgggtaaagaaccacctgaaaggattatacgggaagcaattcccaaggcttatacagaaaacatgatagttctcatttcaaccagcttgagtaaaaaaaactcataactcatgaagcattaggtagagaatataggaaggttgtgtctcagtaatgggaggggaatttgtcttaaaatgtatgctgcaataatctcatcgagaaatgtttagaatcaagactccccaaaagatcatattgtttccaagtaacttaaccatgtaacagaaaaaagaaatcaagaatatctatagaaaattaaaaaaaaatcagtacctaaaattcagtgtccattcaaaattaaaccatgttaacagtatcagacaagggagattttagagaaagaatattaccagagattaacaggatcataatgataaagtggtcaacacatcaagtggacataaaataggaaatatttattattcacctaataaaaacatactaaaatatgtgaagcaaaatctgacagaactgcagagaagtaaatccaatttaatattcagagatgtcaacaatcctcttaaaataattgctggaaccaaaaccacagaatgtcaataaagatagaaaaaacttaaataacatcaaccatttttacctaatcaacacttgtagaaccccttcatcaaacgagagtacagtatacatttcaagtgaacatgtaactcataccaagatagcccatattctgggccacaaagcaaatctcaataaatgtaaataattcaagtcttaatgtactctgaccacaatggaattattgcagaaactaccagaaagataagcaaaatccccaaatatttaggaattaaataacatacatttaaaaagagccatgtgtcaagaagaatttttttaactggaaaacatcctaaactcaactaaaatgaaaccacatcggctgggctcacgcctgtaatcccagcactttgggaggctgaggcaggcggatcacaagatcaggagatcgagaccatcctggctaacacggtgaaacctcgtctctactaaaaatacaaaaaattagccaggcatggtggcaggcgcctgtagtccaagctactcgggaggctgaggcaggagaatggtgtgaacccaggaggcagagcttgcagtgagccgagatcgcgccactgcactccaacctggatgacagagcaagacactgtctcaaaaaaaaaaatgaaaccacatcaagcttgatgggaggtaattaaagcagttctcagatagatttttaacattaacatctcttccccatattaggggaaaaaaacccaaaggtttgaaatgaaggacctcagcttccatgttaaaaagtagcaaaagaaatgaaatccaataaaagcggaaggcattagtaaaactcaaaatggaaaagaaaaatcccaaaatatcagaaaacagaaaattcaataataccaagtactttaagatcaataaaattgtaaaattgataaatctctacccaaaccaatcaaggttaaaagaaaaatatagacattaccagtatcaggaatagaagaggttgcaccactacaaattctacaagtatgaaaataatattttgaaaaatttgagtacttaaataaaacagaaaaactccttgaaagacacaaaccatcaaagctcactctagagatagatggatggatggagtgacaaacagatggacggacagacagatgtatatataactagtatagccctccatctaccatggaaatcaaacttgtagttagatgctgtcctacaaaacacacttcagggccagagtgacagacagacaacacacacacagacagatgtacatataacttgtacagccctctatctaccacagaaatcaaacttatagttagaaactttcctacaaaacaaactccaggcccagacagcttccttggtgaattctaccaaacatttaaggaagaaataataccaattattcacaaactcttccagagagctgaagagcaggaatacttcccaacttactctataaagctggcattatgctgataccaaagccaaacctgggcaagatataaaattacaaagaaaaaaaagcaagcaagcaagaaagaaagttagggacaaatatcactcgtgaacattggtgcaaaacttgttacaaaaaaacaaaacaaaacaaaacaaaatagcaaatcaaattcaacaatatactaaatgactaatacatcatgaccaaatgggaattattacagaaatgcaaggttggcttaacatttaaaaaaatcagtcaatgtaattcatattaaacaactaaaacagaaaaagaaaaaaaccatataggattatggtcaccagagtccaagaaaacgccccacaaatccctattttcacctttgtgtagttctcttccacttttaaccaggattagctagggttacttatgaaatatagcagaaatgacggctcatcactttcagtttaaggtaatgacagatactgtggctttgttcttgtgtgagttctctcctggatcacttgctttgaaactatttctctacaatggaacactcttagcaaagtacaaatgaaaagaaatgaactatgaaacacagaacaccaccatgagccttaatttcagagtttaagaagccaaaaacattagaatacatattaaattactctatctctgtagaattctaggaaatacaaacaaatctacagtgacaacggatcaatagttgcctggggatgggtgaaggaaagggagaaaatataaaaggaatcaggaaacttttggtttgagaagtgccaacatgtatcaaaacttatcaaatggtacactataaatatgtgcagtttattgcaaaaatgtttagactgacttctggacagtaaccttagccataagagacacaggtatggaaatatttctgtaaaccctcataatggagccagagtaatggaaacacatgtggatgtacctttagaagggtcatattccctatagtttgctgcagttttctcattcctttattaatctgggtttctgcaccaactatgattcctacctgggccttctggaggacagccaatatcaactgcctactgaaaaatagacttcagagatcttgacatgtccactgagttcaaattctcctcaagaagccttgggaatatgaagtatcttctgggaacaagggacgtaattcatgttgctcccagacacattagagattatcacaacaaatgcccactgcttagggtgacctcaattacacaaaaaatcttaacatatagaccaaaagattaggcctacaaagactggcattctttcctaggagagctgaagcagtcaagtaagttagcttgacactagcataagagctagtctttgccatcctactatcacttcagagatacagatagttggagctctcacaaaagctgttcttcccttcatactggcttagctcaattctgttctcaacccaacccacaaagcgaacagaatcctcaagatttcagatagtctaaaaattaaggcatttgttgcaaaaccagaatatgaggcagccaatttcaggtcaggtgtcttgaaggctagaaaaattcgtcccaagtgccatgtgagatcaactatatccatgaagggaaacctctgccagtggtcagcagaacaaagctcccatttttctggctaaaactgggtcatgctcatgcttaaaccagtagtggggcagaaaaaaagtgagaatccttgatggcctcaggctactgatgattccctccagggaagggaatagtacagaggtctgtcttttgaaacacattggggttactttggcacaaggcaggactcttccagcacaaagacagatggcttctaacaggcactgccttgacgaaattccagcaagagtctagaaaattcagcatagctccagaaggcttcccatatagctggcactcggaagaacctccccagggtgagtgtttgagtgtataaagttctacttctggctgtcggctacacataaaggctatgcttggagcttctctctgatgtcagttattatgttgaacaaggaaacggaattatctcccatcctaaggcctttctccagtgtgaattttccagtggcggatgagggaagccctctgcctgaaggccttcccacattcactgcacttatatggcctttctccagtgtgaattctatgatgctgaacaagtacatgtttgtggctaaaggcttttccacattcactgcacacataaggcttttcaccattatgaactctttgatgtgcaataaggtcagagctttggctaaagaacttcccacatgcgatgcactcataaggccttgctccagtatgaacactccaatgtttaatgagtctgtatttgtgaccaaagtattttccacattcgctgcactcatatggcctttctccagtatggatactctcatgctgaacaagtgtagatttgtgactataggctttcccacattcactgcacttgtaaggccttgctccagtgtgtactctttgatgtacaataaggttagagctatgattaaaaactttcccacatatgccacactcataaggcatttctccagtgtggattctctggtgctgagcaagtatgggtttgcggctaaaggttttcccacattcaccgcactcataaggcctttctccagtgtggactctctggtgttgaacaagtgagtctttgcggctgaaggttttcccacattcactgcatttgtaatgcctttttccacagtgagaggcctcctcacacttggtgttgctgtgtggcttccactcattgtgaggggcatggtgctcgaaaatgcttgagctggctaggaagtccttacaagcctcccctgtcacaaaagacatctccattgattgcacagcacagttgttcagaagaaagggcctgctcttatcacttctaaagggtttctctccactgtgctgcttctggtgctggtgaaggtttgcactgaagcagaactgtttcccacacagcacacacatgtatggtttctgccctgggtgtgtttcctggtgctcagccaagtgcaaaatgtcttttaagaccaggccacatgtcccacaggggtaagccttctgagtagaaggacctcccttgggaatcctgatctgtgacattcctatagaaaagctctgctcaaaaggtatctcttcatcctccattccatgccaacaacctgaaagcagagaaatgctggtgaagtacaaattgacacaggtggaagaggggaagcctcactacaaatatgtgtctaacacaactaagaccaaggtcataggactgttgttaggacaagggtccaaactcaagttcagcaaatgtgtactatacggtagttggcatctaaatgtcatagaatggagaaggcctcaactgggagaggacaaagatgtggggtacagcacaaaaaagaggcaggtctcaaagtcattcacaatcagattttcttggctgctggggacaggtgagagttgtgcagaaggttatggtccataccaaagaaaatcaaattgctactcagtagttggtgtttaaggactatttgggctacacatctcatgaaacactaagtacaggccaatgctggaaggcactgtagaacaagccatggagaggaacaggtgagacatgaaggcagaggtatggaacatccagaggccaaaggccagagtatgaaaggccagtggccttagcactaatacaactgtaggcacaaagaggctatggaatgatatgaacccagccctgacatcacacctttccccagctcctactcaccagggtcactcccacctggagtctctgtggcaacagctagggtcatgtccacccagtcaggtacccagggctcactacccatcaccagtgaggcaactatgtgggacatgaaagatgtatgtcctaagggaaagatagaacagcactggtctgggtaacccatatagaaaactaaatattattaaaataatctcagagtaaggtcttgcaggaatagtgcagtggtcctagcaagtagcgaccataatggtccctacaattcctgacataggcaggccacaggaaatgtcagctaaaggaagagcgcagaatcccaggcacagaggtgtcatggatacagacagaggaattcagacagggaaaggacaagatggatatgacccactgggctgacaatacaatgcataactcctgaatccatgcctgcaaggctctgagacagcaagcgctgggaatgctcaaaaggagaaagtaggagtgcaaacagcccaagcccagcactcacagaacctactccaggcactaagaaatgagacagtgtccacggctctgatgtaggaaggacaaagatgccctgaaaaaaaggggaagggcaggacccagtccaagtcactggggtggatgtgacggccttacccagagaggccataagtgcaaagttctccagcatcacatcacggtacaggagcctctgagcctcatcaaggagcacccactcctcctgggagaagtacacgaacacgtcctcaaagttcacctgcccctgccacaatcaggagagccaagtccatgagcagcatctctcccaagaacccccatccgtgcccccacacatctccctcctgtacaccctcctacctaactcctcaactcaggaaatatcaggaccagatgtcattggtgtcttctctcgcctcatggtcccaatggatcactgtgtctacccatagcaaccacaggcaggtgaagaagttgtcaccctctaagctctgtgcttagcatacagggcctcacccttctgtaagcaaattcctctggggtcactaacatcatgcttaccagacaaccaaagatgggcttgcctttctcctttaagcccagacgtcatcagtctacacttctttccatatgtacatcactctttggatcacagttatctcacaactctggctctccaccatcactttcctggctcactaaatgcactaccactgtgaaatgaatattctcttttaactcccaatctacataatcatctttaagccatttcaggatgattcccgcccccttgctcttggttcccaccagacatgacagagacctgcaatttcttgaaaactcccttctcagtctcacctctaagtattttgcacaggctggttcctgtgcctggaacaaccttccaaccttattccaatggttggcagaaatggaaacccctccataaaacccctggcccggagtcaggaccctgggcttggggcttctccagagtcctcagacccaagagatcggagagtagcaggagagtgttctatataacaccacaatgctggagagcgtattgggtgggggtgggatcggtgagagcatggacattctcccctcacctgtatagggtccacaattacttctgagttcatgggaacctgtggggaagagggagactatgcgagtcaagcaatcttgaaggaaccccaaaggctcaaccccatcccatattcctacccagttacaatgtgcctgggagctgaatgtctaccctctgtgcttccatcttcaaggatacctcttaactgtgttagctcggaacagtgctcattatccgcccccatggccaacaagagtctgccctccatgagcagtctatggaatactttttaaaccctcggattctggctctcctctgttcagaaccttccatggctcccatcaccctcagaatagagacccagctgctcaggatgatattccaggtgcaatcacttataaagcgctctgatcctttcagacactaaaggcccagttttcccaaatgctccagctgtgaaccatctctgagcctttgcatacactggtctctctgcctggaacgtccttcaactcgtgctgtcaaaatgggtcccaaacacgagcgcccccactgttctagatacaggggcctgagctgcagtaacccgaggaatcgttcattcgaagctttgggattcagagatgggggtcagcgcgcagactcgcagacgcagcacccacctgtgccgggcccatcggctcagccgccgccatcaggcctgtggactacggaagggtggcgacaagtgcaggaacctgggatcagctgtccagggcccagcccagcggctaggtcactcaggcagcgccactgtcaagcctcaggcccacctctcttcagggaagaagacactctctcacgttttcccttttctgtcacctcaggtctgacattgcgttctggaaactaaaccagtggattaatggaaaagcaaacaaaatgtccacccgaggatggtagaggaagtcccgccctgacgttggtgaggaccaacggaaacgcctatttcctgggttttcattggcccagagccgccaagtttcctgggtaatgtagttcccacggcaccaacactagtaagcggcgtctcgcttcacctccaggttaaaagcccagagaagaccgccaggggcgcgtggaaatggtgtccctcgtctccaaggcccagacggagcttagcttcctcttgaaggagccatatctgtatttctggtgaacgtcgtgtttgacatcaaaggaatgtttagagacatgatttcagccttccttacgcagagaatgctcatcaaaaaataaaatggacacaccatacactgacgtcactcagatttctatggctggaagttaacaaatattgttttcaaatgcgtgtagcctgatgctccagagttagtttggcgagcctcagcattttctgtcaggcacaagaaagaaaagactccagacaccatgatgtggaacgtggagtggggatgtttggtggccttgaagtaagtgaataacccttctgtctgttacctcagaaaatatttatcctgcttatacagcagtgattgtgtcaaacccaacaagtaatactcttgttcaagatagtatttcatactccatatacagagatgtattcaatattttaagtgttttacaagtgtctgaaaagacagaattcatcaaatgtcatatggcaatgaaaagggcaacatgaacactttctgtaaagaagaaataaccaccaaactagatgtctatacacaacaaaatgtcttttatggaagtgtgatataaaactatttgaaaccaaaaatgataaatgtaatggaaatacatttacacaaaaaataatgtttaaaataatactcaaggccaaagaaagttgatctcaggtgaaaagtctgcaatgagagaagaaatgaagatgaaaagaagtgcatcttttgattaaaataacagcatattacagtgtaaaacataagtagatatacttattgagttagaatgatggaattcccgtgcgtaacctcaactacatataaattgaaaggaggctagttgctcaaagttttaaattttttatatttccaagtggaaagcaaatgtattacaatcctgtatggcacgctaatgtgttaaacgtttgtaatttttagcctaaatataataaatacagtcagcgtatatacttttcaaactagaagaggaaatgtttggaatataaataaataatcaatagaaaggtaaaataatagtaaaataagtggaagaagtgaggcaaagaaaagcacaatgtaggatatatttaaactgtcaacctaaataacagagattcttcaaagatgttgagttcattcaggaatgcacaggggatttgcaaatccaggacatgcaggctatagggactataggcatatccagagagcttgaaacaaggagaagctttcaaaggcaaaagggaaaagtatatataatttgttttgagataaaaagaacattggtcacagatgtttatggcagaggttaacaccagttcattagtggagacaatctgtcaggcaagtgttctactacatctagagctgtccttgtaactcctgtagcaagctgcggtttgagaagttcttgtcaaaacttcttttaacgggaatatgtgcattaagagccctcagagacagtaatagctcttatcttaagcatgtgtgtttgagtgccctcttttctcagcctcctggctttatttatttatttacttatttatttattttacacaagttactcattttggttttgacaacttttgcaaaacctaaatgactatgcaataaatactcaaataagcagttagtaatttttgatggaccaaaacacgcttcacgaggtattctcttttcttcagtgaatttccacagaatttgaattgtgattgaaagcacaactaacattcccagactccctactctgtcagtaagaaaagaatcatgttgtagttagaaacgtccaaaatctgctttagagaaaccaagacctacgcttgaaggttaccaggcccttgactcacccaactgggctgagatgtcatcagggaactgcatatcatcagcatcttctggttattcatacaggggtgggataaggatgacaataatttacatttaataatgtccatatcctagacattctatcagaccttttataaacactacgcacttttgccctgtaaagtggatttgtcacctaaattaatatgaggaaactgaggtttcttgggtctataatttattttcagctgtagctgttaagtggcatagttggcaatggagtccaaggagccatgactaactacttcccagcatggcctcctaccctaggtcatctatctgggtaggttcagagccctttctatgttagacaaacaaggctatgaaaaattcaatgtcccaggcagctgacatgaggacaagaatgtgtcttgccttttcttcaccacagaaacatgaaccttcagcttcatttattccctaaacgtgggttccttggatgccaatcaagaatcaaaacaggaaaagtcctgctggcccacaaatacagagggtttgataggtgaaatgttattgcctgagcctcaccgtatcatcccaaccacccacatatcctgttacctctgcctcctaatatgtctcaggtcatcttcttctcaacacctccaatttcatgcccttgggccaatctgccaacattcctgagctacacaatgccttctgccttgtatcctacatcagttttttctctactttagttcattctccacatatcatgcagaagatgacttcaacacaaatcaggttctatttgggagaatcagaagcatgttggtggctagagggggaagggcttccctccaaactttagtgttataacatggtttagggttataacctgtcctgcattttcagtggtcccaccagtaatttctatgttgtcttttttgtcaggctcattgctactgtccagcccctaggatttcttcctcagcagaggactcctgtaatgcccctgactcaatccacattctcttcctcctctctcctttacagcaagaactaaaatcatttccttgcagacctaggccagcgaacaggagattcacaaccatgttatcgatttggtgctgcccttcacacttcatggaacatgaaagctcagtgagggtctgagtccacttcccagcagagagagcatagccatgtgccatttatgtgagagtgcaatcttggtacatttagagtaactgtttaatccaatatgcagatggatggtgttcaattaggaattctcaaaatttttttaaaaagaattctcaaataaaaatctcatataattcctattccatttaaagccaatgattttgttttcctgtgctttgaaactagaacatccttgttgtctcaatcccaagacggaagccaagctaaaaaacaaaaggagcaggacttcacagaagccctaaggctcaatgaaggatgggccattgcacattgcacagtctttttaaaaaaacaataattgtactgctatccacacatccttgtgagtcatttctcatcagacatatattctaagccatatgcagtacatacagctctaaattctagtaatcatcctgacagaattctaatgaaggaggtggatgagcatttaccagattcaaatgaatgcaaactgaaaaataggcaaaactatgttagatgacaatgtaagaaatcagacatgccacaaattagacctccttgatgggtgaatgacttacagcgggggttacagaaatgctggtatggctgggcgcagtgactcacacctgtaatccagtactttgggaggcctaggtgggcagatcacgaggtcaggagatcgagaccatcctgggcaacatggtgaaaccccgtctctactaaaaatacaaaaaattagccgggcatagtggtgcgtgcctgtagtcccagctactcgggaggctgaggcaggggaatcgcttgaacctgggaggcggaggttgcggtgagctgagattgcaccactgcgctccagcctggtgacagagtgggactctgtctcaaaaaagaaaaaaaaaaagaaatgctggtatactaacactgttcttttttgattggcacactgcttttagagatgtgttgactttgggaatattcattgagctgtacaactacatgttaatttttgtgaatgtcatttgtaaattaaaatttaccaaaagttcatgctaacaaacccgaagtgcctattccatattgttatgcaggctggatgtgatggctcatgcctgtaatcccagaactttggaaggcctaggcaggtagatggcttgagctcaggagttcaagactagcctgggcaacatggcaaaactcgtctccgcaaaaaaaaaaaaaaactagccaggtatggtggcttgcacctgtggtcctagctacttaggaggctgaggtgggaggattccttgatcctgggaggtggaggttgtggtgagctaggatggcaccactgcactccagcttaggcaacagaaggagaccctgtctcaaatatatacgtgtgtgtttgtgtgtgtgtgtgtatataattctccaatgtagaataatatatatattattctccaatgtggaataataattaataataatactaataattcttgggcatttacccaattgaaataataattcttgggtatttgcctgattgaaatgaaaaactgtctttaagaaaaattcggctcttctccctttaagaccagctctgcctctgcctctgcctctgcctctgcctctgcctctccctctccctctcccctctcccctctcccctctcccctctcccctctcccctctcccctctcccctctcccctctcccctctcccctctcccctctcccctctcccctctcccctctcccctctcccttctcccctctccctctcggtctccctctccctctcttgccatggtctccctctgatgccgagccgaagctggactgtactgctgccatctcggctcactgcaacctccctgcctgattctcctgcctcagcctgccgagtgcctgcgattgcaggcgcgcgccaccgcgcctgactggttttcgtacttttttggtggagacggggtttcgctgtgttggccgggctggtctccagctcctaaccgcgagtgatctgccagcctcggcctcccgaggtgccgggattgcagacggagtctggttcactcagtgctcaatgttgcccaggctggagtgcagtggcatgatctcagctcgctacaacctccatctcccagccgcctgccttggcctcccaaagtgctgagattgcagcctctgcccggccgccaccccgtctgggaagtgaggagcgtctctgcctggccgcccatcgtctgggacgtgaggagcccctctgcctggctgcccagtctggaaagtgaggagcgtctctgcccggccgccatcccatctaggaagtgaggagcgcctcttcccggcagccatcccatctgggaagtgaggagcgtctctgcccggccgcccatcgtctgagatgtggggagcgcctctgccccgccgccccgtctgggatgtgaggagcgcctctgcccagccgccccgtctgagaagtgaggagcccctctgcccggcagccaccccgtctgggaagtgaggagcgtctccgcccggcagccgccccgtccgggagggaggtgggggggtcagcccccgccccggccagccgccccgtccgggaggtgaggggcacctctgcccagccacccctactgggaagtgaggagcccctctgccgggccagccgccccgtccgggagggaggtggtggggtcagccccccgcccggccagccgccccgtccgggagggaggtggggggatcagcaccccgcccggccagccgccctgtccgggagggaggttggggggtcagccccccgcccggccagccaccccatccgggaggtgaggggcgcctctgcccggccgcccctactgggaagtgaggagcccctctgcccggccaccaccccgtctgggaggtgtacccaacagctcattgagaacgggccgggatgacaatggcggttttgtggaatagaaaggggggaaaggtggggaaaagattgagaaatcggatggttgacgtgtctgtgtagaaagaagtagacatgggaaactttaaaaaaaaaaaaaaaattcttccagtgatctggtagaattgtaagaaaaaaaattctttaatcctaaggcaaatatacagtggttttattattaatgtacagtttctgacaaattattaacacatgaggtgtattaactatgatatatacagacaatgggatactactcagcagtataaataaagcattgctacacaaaacaagggtgaatcacaaatgcattacactaagtgaatgaggccagactgcaaaagctacgtgctgttggattccacgtatgtaaccctggaaatgtgtacgttcctaaaactccaagaagacagaaatcacatccatgatcctggggccaggagtaggggaacgaattaacctcaaagtggcatgagagaggaggagagagctgcaaactgaccactgagcacaatcatgtccagtttctcacatcactgctttccgcatgccctggtccagccactgtgtcttccttcctgttactgcagctcactaagttttctcccaccacatctctttggcacttgctctaccttttacctgaatatgttaaacttggttctttcatagctgcctccttctcatttttttttttttttttggtgtcaactcaattatcaccttcaagaaagccacccacatccaactcatctgaatgggcagtgtcctcagccttcagtttaaacatttccaactctgtcctcaatacaactgccattccctcacattctccccttcatatcccctattattttcatcactacttagaacaacttctggcatttgttatttatgtttgtctgtttttttaccattctaggttcagtttccaggtagaatgtggacttggcaaattctacaaaaccagaccaatattttcaaggcttgacctgggaggagagaatggtgtatttgggtggtatgagcagaggaaaaaactttttctcagtattttcagtcattttctggtgagtcagtgttcagcagagcaaggacatccaggtaagtctcaaagatgtggtatctatggaagagtagatgattgtagtggttaggaatagctgtactcttgagtagttggtgatcgtggttcctcagttccactggagcttccgaagagtttataatcaccaagccaacatctgctgggatggtgtctttgagcataagactatgtttgggcaataacaggacatagggctgcttacctgttgtagagcagaactgctcttctgaaatattagtctccttcctcgttgaggaaatggttatattttcccatcctgtggcctcatctccctgcctacttttccttataaggatagttcagatgggttagtcttggctctctagctgaggcgaccagacttcaagtgtctgaggaccaggtagccatctccatggaagtccagagtttccagagctgctgggtggtgacttcttccgttaagctctaaccttggggagggcaggagatgtcatcaaaatttgtttagttggttacagccctcagccttccctcattccctgcagctgctcatgtgttgagggttgacttgtgattagaccctgaggtgcatctgcttttcatgccatcttggatgggttagacttcccaaacacagaggaatgtgcttgctagccctgaaggagatatggccaaaggtagagtcttggactcaaactttgatgttcacactccttatagacatgtaaatattcctaaaggttggaaataaaaatagattccagaagttagagagaaaacatatagacccggcatatgttgcttttaaaaaataaaatagcttcatgggatttttttgtgaattcaatgagatataagtgaatttcttatgtagataatgattttacctaaaccaaataattagatagtctacttggtcctcaccagtcatgttatttgcaattctacatatgagcctgctttagtgggttgtctcttcctgtgataaaattaaaatgtctacatatactctttatttcaaaactatcacacaattcactacaactttcaaaagaggtatagtttgttttttaattaaaaccacatctgtgaaacaaccagtagtgataaaacatagtttctttctttttttttttaatttatttttttgagacagagtcttgctctgtcacccaggccggagtgcagtggcacagtctcagctcactgcaacctctccctcctaggttcaagtgatcttctgcctcagcctcctgagtagctgggatcacagtcacctgcccccacgcctggctaaaaaatatagttcctaggcatcctttcttttcacatcacctcacatgcctgatacaccccattaagctaacatttgcatgacatttttgttaatcattttgataatcattctataaatgtctttatagttttactacatacatatattttcctaaatgatatactgtttcttatttccagattctgaattttctatacattttacactgtatgggtgactagattctataatatgttttttaggtttgtccacaaaggttcctgtcatgatggtaagctaatttccataatctattagatgattaatccagaatctgctcttctaatagatgttctcaaggaagtgaaacatttattcctgtgcttggtttcagaaggaggatattatttacatattgtcccactcctgtcatggactcatctctcctcactctcctcctcccctcccttccatatgccacataatggtctaactgaaataactaatgccatagctgccatggaaggggtaaagagcttgtgtctctctctattctaccatgttctcaatcccaatattgactcccctcctccttttcagagtcaagtagtactgaacacccagttccagaaagctccaagaaggagggagggcttcattttctcttgtcctcataagtcactccaatgctgtgttgaaattgatcattattcagccaacagatggaaggggcaggaaaagaagtagggaaattagattgacacgaggggactagattcaatgggaatggatgtagtgggactacacataataaagggttgacatcttttttttatcaatagttgtgtgttgtaaacaacagtctagcattctacccacctgtgaggaactggctttatatttggaaatggaagagcagtgggaacatggagcataaagggatgaaggagagaaatggagggggagttgcctcatgggtttgccgcctattgttgtgcctgtacaccaatgttgggtctttgaggaaggaaggagcacaaatgagcatgggataaaggaggaaagtaaatccttgggctcccatactctctcatcacctacatccagaattcagagccttttcttattgtcatacatcaggcattgcttggccaccgttaattttaatattgggtgtccttttgtcaaaggaaatttggggatctatacgtggctcttcccagagaaacctctttactgtggccctgaagatcctcttcaattccttcaaaagaaggaaagattggggtatcagctgcaggaaactgaaatccaggcccatctccaaaaacagcagtttctggatgagtccgagagaagttctcaaccctaatttctcctccatctcctattccgttatctccatctccatcatcatctccatctccgtctccatctccatcatcatctatcatctccaatctccatctccgaagttatgcccacttcctggaagtttggaggcacgggaactacattgcccaaaaggcgcagcgccgcgaggcggcgatccctgaccaatgaaaagaggtctgcccgagcgtgcgacacgcaatgggcgggacttccggcgtctcgtttggtattcactttcgcgactcaggtgaactaacctgcgagaagctggttgtgcgctgaggcgaccagcgccggaaggcacggtggcgactcacgctgttctcgccgctcagaggcgggtctgaggctcggtggcggcgcccagggtggcccgggccctttcctcggtcattgtctcccctccagctctactcacaggctccgatggcggcggccgccctgagggaccccgctcaggtgagcgccgcgtcctcctggcctcccccgaatcctaaagccctgtgagggccgcctgctcaggtccccgggtgcagaactgtggggcgttcgtgcgcggcgtcccgtttctgacacgcagtgtgatggggtggcaatggagggcaaggggcccggctcgcaaagatgtgaggcgcattcagcgagtcccgaacctgaggcctcctggtgtctgtagtgggcagcttgggaagggacgaggcgcgtgtcgagcgacagcccgagcagctgcgctttcatcctgagggggccacagtggccgcggagggctggagacagaagagtgacaagatctgtttctcaaagtttgccaaaggcccttcaagtcaaaacagactggggtgggggtgaggcgggtgaagacagacctgtgagtaggtaaattcagtagactagtggagagtctactgggactgggccacagaggaggggaagtgatcagatcttggatggatatcaaaaactgaacagacaggaattcctgttgcatcagatgtgactgaaagaaagggaatgaagagccattctggatttttatttgtatttttgtttgtttgttcctgaatatcaggaaggatggagatgggtaaggctgtgcagggagtaggttttggacatggtaatcctgagatgacccagagtggaggtgtcgtgtccacatgggcagcttgcccactcacatctggaagtttggggagggatctgggctggagatatggtagatatgggctggttgggtagaggcctggactagggtaagtcctggggctcctatttaggagggagaatcttaaggttccctttcagatgggccctaaggtgagagaagggagagatggccctgtaggacggggctgcctctatagcatggagttttgtggtcagaagtggttctgtctggtgtctgccggaatggagggttatagagtatgaagacccaggactgcatggagactgcagtgttgagtagtatataggtttgccactccaggctcagcagttcctcatgtacagtccgtatggacaaaaggaaacgtcagccaggctgctggagcagcccctttggtgcctaagtttccctagccgtcagcacaggagggatgatcaactgctccagtagaagggctctcagcaggatggtcttcaggggagtatatagcaggcagccaggttgccaaaaggaatggtatgtgctcaggtttctcagacccaggtcccagtttattaacttgtgaatttatgaggtaagtatttaagcactaattgatcatagttcatatacacacaggggcaaataaaacaacacggatttattaagttaaactgatgtaagcacttcataattggttgtaaagttagtatactggaaagtatttgattaaaataaagcaccttaagtatcacattcttaatttaaaagtaagtttaagaaacccatattttctttttctttctttctttcttttttttttttttttttttttgagacagagtttcgcttttgttgcccaggctaaactgcaatggtgcaatctctgctcactgcaacctctgcctccctggttcaagcgattcccctgcctcagcctcctgagtagctgggattacaggcatgcaccaccacgctcagctaatttttatatttttagtagagacgaggtttcaccatgttagccaggctggtctcaaactcctgaccttagacgatctgcccacctcggcctcccaaagcattgggattacaggtgtgagccactgcgcctagccagaaacccacattttgaaaacctaccagtttatttgcgctgaaaatgttgacagaagcattaattatgtgtacagtaagagttgatacttagtcctagacacataagaatgagtttgatacaaacaatcgtcctattgagtaaataccattattattgccatgttgcagatggcaacaccaaggcacagggaagttgagcacttttccaagggcacacaacaggtaagaggcatcactaagaaccaaagcccagattgtagatagtcaggcacacctgactccaggctagacgagtgggcttggatgatcctttggcaacatcactgtctggttctcatagtcttgattttccataggttcctgtggctgcagacttgcttacagaccatgaggaggtaagtggaggatgtctcaggtcctcacactcctgcactcctacctacatggtcttcagaattatggtgtcttgaggctccttgctggctattctccctacccttccatttgagttccctggaagatggtcacacacagtcagggccctgagtccagactatatattatttttattattttcttttaagacagagttttgctcttgttgcccaggctggagtgcaaaggcgcgatctcggctcactgcaacttctggctcctgggttcaagcaattctcctgtctgagcctcccgagtagctgggattacaggcatgcgccaccacaccagctaattttggatttttggtagagaggtttctccacgttggttaggttggtctcaaactcctgacctcagatgatccgcccgccttggcctcctaaagtgctgggattacaggcgtgagccaccgtgcccaacccagactatgtattctatggagaggttctcatttctggcaaccaatgacaggaggtttagaaggcatagtgatcaacattagaaaatacatggaggtaaggttgagctgggaatgcttagacaacctcagatctccattatgtctgggggaagcatcagcgggtataaggccaacatgaagtgattggctgaggagctgagctgaggtgtcctgatatgtgtgcaattccaagtagctaaagatgaagcaagaaaaagagccaaggagggaggccttcaaagtggggctgaggattggccctggcagtcagtgccattgggggtctgggatggcacggagttctgattgcatttggtaagtgccctctggatgccatgtgtagactggcatgtggtgacactaggggaagcacatgaggtgatgtagagggtagtggttgtggtacaaagtatgtgcacattctaataagtgtaaacagatgtccccaggaccttgtactgggggcttcagggagaacactgacacaaatttgattgtatttgagaaacacagtctaggggatccaaggtaaattgtctggcaagagaagagtaggactctgcataccatgcccagagctgagatggactttatctgcctacctgcctattgttgctcagtgggagcatgaggagagagtgggcatcagtggctctggggcagggtctctcctctgagatggggattaaggaagagggtgagcaggggtggatgtttaggcagatgcctaaatttcccagtaaggaggctgcagataaactctactctgtccatcttagcagggctatgtgacctttgaggatgtggctgtctacttctcccaggaggaatggagattgcttgatgacgctcagaggctcctctaccgcaatgtgatgctggagaactttacacttctggcctctctgggtaaggttctcacaccccaccccagcatcctgagctgggctcggcttttcctccttttcctagggagaggtctgttcttcccaaagctgaactgtgggcactcattccttctccagtatcctgaagtagctattgtaataggcctgggctgtgtatactaccaccttctctccccaagctgccccacagctgtgcaggaaagggtttgggggtcaggagtcttgcagtcagcttgatggatcttatccctggtggcctctctgtggcctggtgacactgtgcagatctgtggtagttctattcccctacattctgcctgtctcctctagccaacatacctgggtgtcggtctgtgccagcaattgagtcaccaatgtgattgctgtttgactgtgttgttcctgcaagaccctcctccaaggttctttctgtactattttgttttctttcctgtggtccatgatgagataagtcattctggctcagtgctgccactcacctgtcgttttccttaggacttgcatcttccaagacccatgaaataacccagctggagtcatgggaggagcccttcatgcctgcttgggaagttgtgacttcagccataccgagaggtagttggtgggtggagctcagggaggtgtgaactcagggatggattcatatcataccagtaggcccagatattttgataccaaggcaaggggttgtcgctgatttctatcttttcttccttagtcacccatttatatctattctgatgtttgacctagggccattccccacctctctgtcctccatgtttcacccagtcatcagcagaacccttcagcagtggctttcactgaatgtgtggtgaggtggatgcttatccttgcatagtccttgagcatcagctatttggttgcagttggttttttctggacctggacataaccttctgtgccgtgttcctgtgtctccagcagccaaagtcctgtggaaagccatttgcagaggattgtgttggggacactgcctctcctccctgtgctataccccatccttgcatccttggtgctcatgaggcctccccaaatccttgagctggccagattcagcactgcacagcaggcccttccctgctgagagctagccctctttatttctgctagcagccccaggcactaattactgggtgtgttagacacatctgtgagagtgctgcctcctcacaccaaagtctacatttacttcttcaacatttatcttctgtcaggttgttggcatggagccgaggctgaggaggctcctgagcagattgcttctgtaggactgctcagttcaaacattcagcaacaccagaagcagcactgtggagagaaacccttaaaaagacaagagggcagggtcccagttttgaggagttgcaaagttcacctatcagagaagtccttgcaaagcagggaggttgggaaggccctcctgatcagctcaggtgttctcaagcaccaggtgactcacacaggagagaagtcacataggagctccaaaagtagggaggcctttcatgctggaaaaaggcattacaaatgcagtgaatgtgggaaagcctttggtcagaaatatttacttgttcagcaccagagactacatgctgggaaaaagacgtatgaatgcagtgaatgtgggaagttatttagagatatgtccaacctttttatacaccaaatagttcacactggagaaaggccttacgggtgtagtaactgtggaaaatcctttagccgtaatgctcacctcattgaacaccagagagttcacactggagaaaagccttttacatgcagtgaatgtggaaaagctttcaggcataattccacacttgttcagcatcacaaaatccacactggagtaaggccttatgagtgcagtgaatgtggaaaattgtttagtttcaactccagcctcatgaaacatcagagaattcacactggagaaagaccttataagtgcagtgaatgtggaaaattctatagccacaagtccaaccttatcaaacattggcgtgttcatactggagaaaggccttacaagtgcagcgactgtgggaaattttttacccaatgctcaagcctcatgcaacatcaaaaagttcacactggagaaaagccttttaagtgcaatgaatgtgggagattctttagagagaattccaccctagttagacatcagagggttcacactggagcaaagccttatgagtgcagggaatgtgggaaattttttagccaaagctcaaccctcatgcaacatcgaaaagttcacattggagaaaagccttttaagtgcaatgaatgtgggagattgtttagagagaattccagccttgttaaacatcagagggttcacactggagcaaagccttatgagtgcagggaatgtgggaagttttttcgccacaactccagtctttttaaacatcgaaggattcacactggagaaatgcagtgattgtgtgaaatcctttagccagcgtttcaacctcattcaacaccagaaagttcacagtggaaaaaatcttgaaggtaacagatggaaatccgttagccacacctccagtctcattcaacactggacagtttacaatgtggacaatgtagtgaatatggaaaaaggtttcagccaaaggcctaaccctattcaacaccagaaagtttacactggagaaaggccttagggtgacaggttatgtactgtctctgaatcaatatgacctcacttaaaacagaaactctgaggatggcctttatgagggagctggcaattgaacatcattcatctaaatatgcacactggaggcaagatgagaattcctgacagattgtccttcctgagaagacagccctctgccttggagctccagagagagggagccctgtattcttggctgtacccgtcgaatggagttttgatctcgctgagtttggagttgggggaggaaaggagtggtcttggttcaaatgtgactcacttttgctgttcttgtgaatgttagatcttctttaataaatatttatttcccatacacccttatgaccatttccagagactgaattgtgtttttataattttcacccttttggctgtgtaacaggtctgcaaagctcctcattcagttattctgtaagttgatccaaatgtttcaaattttaagaacttgccaaattgtgttctaaatggttagcatttcatatttcctcctggaatatattagattttccatttcttcacattactgacagtttatatgtgtagaagtcataggccattcattttagccatgttactaagtgtgaagtagtatttcattgtagttcttaatttgtatttttccgatgactcagttttgagcattttttaatgtgtttacttgtcacccatatatcttctttagtcaaatgtattttttgcctgttttttaaaacatttggttggttacaagttcttaatatttctggagacaaattccttatttgatataagcattgtcaatattttctcatggtccatggcttttgttttcttttcttttttaaaatttagagatgaggtcgtgctatgttgcacagactagtctctaactcctggcctcaagtgatcatcctgcctcagcctcccaaagtgctgggattacaggcatgagccaccatgcttggccttgttttcagttcttaacagtatctttcctagagcagattgtcttaattttatggagcccaatttatccatttgttattttattcattgtgcatttggtgttgcatcctcttactataccatatctttgcctataaataaaagccttgactgagtgcggtggctcacgcctgtaatcccaacactttgggaggccaaggcgggtggatcacgaggtcaggagattgagaccatcctggctaacacagtgaaactccctctcaactaaaaatacaaaaaattagctgggcgtggtggcggctgcctgtagttccagctatcctggaggctgaggcaggagaatggtgtgagcccgggaggcggagcttgcagtgagccgagattgcgccactgcactccagcctggggcacaaagccagactctgtctcaaaaaaaaaaaaaaaaaaaaaaaaaaaaaaaaaaaaaaaaaaaagccttatgtgagtatgctactgtaatcttatgaatctttttaaatatccaacttctgaaatatttgtaggtttaactacaaataaataattcaatatatagataaatgtgtacatattccctatctttactgagagcctagcaagccatggcattccagtagttttgagcacatttaatacccagttattggtttatatcattttttaataaaaggaaccagaactccttagagaagaggctgttttcaagttgtggcagaaaaggtacaacatgatttgaggaaatactgcattggaaaataaataaatgttcacagaataatgttgacatattagctttttattgctatcctgacaaatcaccacaaacttatggtttaaacaacacaaatataacagaagtctcactgggttaaaatcaaagtgttggcatgattatgttcctttctagagtctcagggaggatctgtttcttgcttatttcagttgttagcatatttaagttcttcgtggttgtaggactgagattcctttttcttgatggcatcagctgagggtcattcctaggatatataagaacttttatgaaaaaggaagaagtaataccaattgtatacaaacttccaagaggacaaaggttcaaagaattctggactatatgaaagttagcattaacaggacactaaagcaggcaatgacattaaacaaaactatagaccaataatcacatgaatatagacacagagccttaagaaaattttagcaaattgaggcactcgtccttcaaatcacccccttgggtctcttccaagcatacttgcctttctttcctgttctaaagcctttttaaataaacttgcactcatgctaaaacaaaacaaaaagacatttagcaaattgaatccagccatatacaaacaataataaatcataacctagtgaggtttatcaataatacaagtttgattcaacaattcaaactctttattaatctatattagcagactaaaatgaaaatctcaaaatgtaataaaagcattttacaaaattcaaaactaggttatgatacatgcaacaaattaaacaagatggtgatttcttcaacctgatacagcacatctatgaaaaacagctaacagcacatttgatatatatgtgatcaaatatttgataagctgattttccccaacattaggaataacataaatacgtcaacattcatcacttctcattaaaaaaaaaatctaatgattgtaaaggcagaacccaaactgtctgtatttacatatgacatgataatgttgaaaattcgaaattatctactaaaaagctactagatctaataattgagtttagcaaggtcctaagataaaaaggccagtgtataaaaagtaggtgtctctactaggttggtatatagctagcaaatacatgcttggcaactgaaaaaatgtacttcacaatagcataaaaatatgaaatatttagaaataaatttaacaaaatatgttcaagaactttaaaacattcctgagagacattaaacaaggcataaataaatgacacaagaagttcctgaatctgagacttaatactttgaagttgtcagttttcctttaactatcctaataaaaacctaatcttttaaataaaaatttacaaatgtattctaaaaagttacatggaaatacaaagggcctggactaattgccaaaacaattttataaataagaataagtttgaaaatctttatgactttaggacatacaaacgtacagtaattgagagtacagtattagctaaaggacagagatgaacagaagagaacagagaacccagaaatacactcacacaacactctattgtcaatctcttttcaagaaagttgcaaaagtagtaaaacaacttcagaaaacagtgtagcagctttaaaggtagcataagcttaccatatagtttaggaatcttacctattgggatatccccaagagaacaaaagcatatgttctagaaatacttacacttgcatgctcagcagttttatttataaaacccaaacaccagaatttgtttttaaaacacacacacacaaactaaaatttccgtgaacagaagaatgaataatcaattatggtatatcttaacataaaataccattcaacaacataaaagaataaactatgaatacaagtaaaaatatcatagataaatctgaaaatccctgagccaagtggaagaagccagacacaaaagttgacatacagtatgattccatttatatgaaatgaagaagctgcaaaactagagtaaaagaatgcagatcactggttattgagcctgcggtctgagggggaaggttctgactgaaagagtacaggaaaacgttatcaggcaatggtaattttctctatcatgactgtgttggtggtttcatgacagtacagctgacccttaaataacacaggtttgaaatgcacaggtccaattatatgtgaatgtttttcaataaatatactggaaaaaatttttgaatatttgagacaatttcaaaaaaccagaattcattgaaataggtatgccaagaatgcataacacaaaatatatgtaggttctattttatcattacaaaaccagagcgatattttcttttctttttttttgtttttgagacggattctctccctgtcgcccaggctggagtgcagtggcatgaactccactcactgcaagctccacctcccgggttcatgccattctcccgtctcagcctcccgagtagctgggactacaggcacctgctaccacacccggctaattttttgtattttttagtacagacggggtttcaccgtgttagccaggatagtctcgatctcctgaccttgtgatccacccgccttggcctcccaaagtgctgggattacaggcgtaagccaccacctccctactctttctacccaataaatatgaaggtctgtggaagctcagggcccttcctcactagaagcaagaagccccctgaccccttctttaaaacagatttattttgcctttgttttcatttctgcattcgttccccttcgttcagtcccatagtaactgtgacaggaatatggagcagaaatggatgaaggggagaaattgagggggagttggcttatgggtttgctgcctgttgttgtgcctttacaccaatgttgggtccttgaggaaggaaagaacacaaatgagaatggggtgaaagaggaacgtaaatccttgggctcccctactctctcatcacctacatccagaattcagagccttttcttattatcatacatcaggcattaatattgggtgtccccttgccaaaggaaatttaggaaggtatacgtggctttgcccagtgaaacctctttatggtggccctgaagatcctcttcaagtccttcaaaagaaggaaagattggagtatcagctgcaggaaactgaaatccaggcccatctccaattacaacaggttccagatgagtccgagagttctcgacactcatttctcctccatctcctactccatcatctccatctccatcttctccatcatctccatcttcatcatcatctccatctccatcatctccatgtccatcatcatctctatctccatcatctccatctccatcatctccatctccatcatcatctctatctccatcatcatctctatctccatcatctccatctccatcatctccatcatctccatctccatctcctactccatcatctccatctccatcttctccatcatctccatcttctccatcatctccatcttctccatcatctccatcttcatcatctccatttccatcatctccatctccatcatcatctctatctccatcatctccatctccatcatctccatcatctccatctccatctccatctccatcatctaccgtctccaatctccatctccgaagttatgcccacttcctcgaagtttggagccacgcgaactacactgcccagaaggcgccgcgccgtgagccgcgatgcttggccaatgaaaagaggtctacccgagagtgcgacgcgcaatgggcgggacttccggcgtctcccctcggcggttgctttcgctgccctcaagagaactcagcttgccggaagctggttgttcgctgcggcgaccagctccggaaagcgcggtggggacgcgctgtgttctcgcagctcagaggcgggtctgaggctcggtggcggcgcccagggtggcccgggccctttcctcggtcgttgtctcaccgccacaggctccgatggcggcggccacgctgagggaccccgctcaggtgagcgccgcgtcctcccggcctcccccgaatcctaaagccctgtgagggccgcctgctcaggtccccgggtgcagaactgtggggcgttcgtgggcggcgtcccgtttctgacacgcagtgtgatggggtggcaatggagggcaaggggcccggctcgcaaagatgtgaggcgcattcagcgagtcccgaacctgaggcctcctggtgtctgtagtgggcagcttgggaagggacgaggcgcgtgtcgagcgacagcccgagcagctgcgctttcatcctgagggggccacagtggccgcggagggctggagacagaagagtgacaagatctgtttctcaaagtttgccaaaggcccttcaagtcaaaacagactggggtgggggtgaggcgggtgaagacagacctgtgagtaggtaaattcagtagactagtggagagtctactgggactgggccacagaggaggggaagtgatcagatcttggatggatttcaaaaactgaacagacgggaattcctgttgcatcagatgtgactgtgaaagaaagtagggaatgaagagccattctggatttttatttgtatttttgtttgttcctgaatatcaggaaggatggagatgggtaaggctgtgcagggaataggttttgggcatggtgatcctgagatgtcccagagtggaggtgtcatgtccacatgagcagctggaaggcctggggctcgtatttaggagggagaatcttaaagttttctttcagatggtccctgaggtgagggaagggagagatgggcctgtaggatggggcagcctctacagcctggagtttcgtggtccgaagtgattttgtctggtgcctgcaggaatggagggttatagagtatgaacacccaggactggatggagaccgcagtgttgggtagtatataggtttgccactccaggcttagtagttcctcatgtccagtccatatggagaaaaggaaaggtcagccaggctggtggagcagcacctttggtgcctaagtttccctagctatcagcacaggtgggatgatcaactgctccagtagaagggagggctctcagcaggatggtcttcaggggagtatatagcaggcagccagattgccaaaaggaaacccacattgtctttctttttctttcttttttttttttttttgagacagaattctgctcttgtgatctgcccacctcggcctcccaaagtgttgggattacaggcttgagccactgcacccaggcagaaacccacattttgaaaacctaccagtttatttgcactgaaaatgttgacagaagcattaattatgtgtacagtaagagttgatatttagtcctagacacataagaatgagtttgatacaaacaatagtcctattgagtgaataccattattgccatgttgcagatggcaataccaaggcacagggaagttgagcatttttccaagggcacacaacaggtaagaggcatcactaagaaccaaagcccagattgcagatagtcaggcacacctgactccaggctagacgagggggcttggatgatcctttggtaacatcactgtctggttctcatggtcttgattttccataggttcttgtgacttcagagttagttatagaccatgagaaggtaagtggaggatgtctcaggccctcaccctcctcaactcctacctacatggtcttcagaattatggtgtcttgggactccttgctggctattctccctccccttccatttgagttccctgcaaaatggtcatacagtcagggtcctgagtccagactacatattattatttatttatttatttttgagacggaatttagctcttgttgcccaggctggagtgcaatggtacaatctcggctcaccgcaacctccacctcccaggttcaagcgattctcctgtctgagcttcccaagtagctgggattacaggcacgtgccgtcacgcccggctaattttgtatctttagtagagacggggtttctccatgttggtcaagcaggtctcaaactcccaatctcaggtgatccgcccacctctgcctcccaaagtgctgggattatagacatgagccatcacgcctggcccagattatatgttatatggagaggttctcatttctggcaaccaatgacaggagatttagaaggcatagtgatcaacattagaaaatacgtggaggtaaggttgagctgggaatgcttaggcaaccttagatctccattatgactgggggaagcatcagcaggtataaggcagacctgaagtggttggctgaggagctgggcctctattgtttgtatttttgtttgtttgttttttcctggatatcaggaaggatggaaatggggaaggctacacagggattacggcccaatcttaacaagctttttctgctttgagaacacctgtagggttaaaggtggaggctgggagtccagcaaagaggctactacagtagtctgtgtgagtgctggaccagagtggtggctgtggacgtaggagatgtggttgaagtctgcgttttttttgttttgttttgtttttgtttttttgagatggagtctcgctctgtcgcccaggctggagtgcagtggcatgatctcggctcactgcaagctccgcctcctggttcaagccattctcctgccttagcctcccgagtagctgggactacaggcacctgccaccacgcccagataatttttttgtatttttagtagagatggggtttcaccgtgttagccaggatgatctcgatctcctaacctcatgatccgcccgctttggcctcccaaagtgctgggattacagacatgagccacagcgcctagccagagtctgtgttttttaagtagatatgggcagattttctaaagtgtagggtgggagaaagaggttaatggtaagagtaattttcagtgggaataattaagttaggttttggccatgttgatatgagatgttccagagacccttgagtggattcattgagtgggcacctggacagagaagtctggagttcaggtgaagggttcagattggaaacccacatgatacagttggtgtatggaccaaatggagcagtggagcagatttaggagggagcatcttgaggtcctattggtaatgccattaggtaataagggagaatgtataggggccaagaactgggtctcttgcttggatacctggatgggagtggtgggtttcacaaggacatgagggagaatggtggccatggggaaagggatgtaggggtaaggagggtctgactagtggccaaagttcctgtggggatagacatgagatggacatgaagatgaagctataatgaggtaagatgacaggaaggcaggcactgctgcttattcatccaactgtgggatcacaaggcttttgtttttacctggacctggggagtttctcaggctgctggattagctcaagatcaaatgaggtcatctgagagaattgctgggcctggtttgggagacgtgggctttttttttttttttttaagatggaattttgctcttgttgcctagactagagcgcaatggcaagatcttggctcacggcaacctccacctcccgggttcaagctgttctcctgcctcagcctcccgagtagctgggattacaggcatgcgccaccacccccaggttaattttgtatttcgggtagagacagggtttctccatgttgttcaggctggtctcgaactcctgatctcaggtgatccacctgcctccgcctccaaaagtggcaggattacaggcatgagccaccatgcctgtcctggccttcgattctaatgagagtcagaggaacgctgacattgggcaggaacagcttttcaacacagaaatggaagagtgccacaggtgtccagatatgcgtgcagttccaagtagctgaaggtgaagcaacaaaaagagcccagtagagaggccttcaaagtggggctgagggttgcccctggtagtcagtgccattggaggtctaggaagggatggagttctgattgcatttggtgagtgccctctggatgccatgtgtagactagaatgtggtgacgctaggggaggcacataaggtggtgcagggggcagtggttgtggtacagagtatgtgcacattctaatgagtgtaaacagatgtccccagggaccttgtattgggtgcttcagggagaacactgacacaaatttgattgtatttgggaaacacaatctgggggatccaaggtgagttgtctggcaagagaagagtaggactctgcataccatgcccagagctgagatggactttatctgcctacctgcctctgcttgctcagtgggaacatgaggagagagtgggcatcagtggttctggggcagggtctctcttctgagatggggattaaggaagagggtgagcaggggtggatgtttagggggatgcctaaattccccagtaaggagaccgcagataaactcaactctgtccatcttagcagggctatgtgacctttgaggacgtggctgtctacttctcccaggaggaatggagattgcttgatgacgctcagaggctcctctaccgcaatgtgatgctggagaactttacacttctggcctctctgggtaaggttctcacaccccaccccagcatcctgagctggacttggcttttcctccttttcctagggagaggtctgttcttcccaaagctgaactgtgggcactcattccttctccagtatcctgaagtagctattgtaataggcctgggctgtgtatactaccaccttctctccctgagctgccccacagctgtgcaggaaagggtttgggggtcaggagtcttgcagtcagcttgatggatcttatccctggtggcctctctgtggcctggtgacactgtgcagatctgtggtagttctattcccctacattctgcctgtctcctctagccaacatacctgggtgtcggtctgtgccagcaattgagtcaccaatgtgattgctgtttgactgggttgttcctgcaagaccctcctccaaggttctttctgtactattttgttttctttcctgtggtccatgatgagataagtcattctggctcagtgctgccactcacctgtcgttttccttaggacttgcatcttccaagacccatgaaataacccagctggagtcatgggaggagcccttcatgcctgcttgggaagttgtgacttcagccatactgagaggtacttggtgggtggagctcagggaggtatgaactcgggtatgggtttgtatcataccaggagtctttccagtgggcccagatattttgataccaaggcaaggtgtcgtcgctgatttctatcttttcttcctcagtcacccatttatatctattctgatagttgacccagggccattccccacctctctgtactccatgtttcaccccatcctcagcagcacctttcagcagtggctttcactgaatgtgtggtgaggtggggcgcttattcttgcatagtccttggacaccaactatttcattccagttgttttttttttttttttttgacagagtcttgctctgtcgcctaggctggagggcagtggcgtgatctcggctcactgcaagctccgcctatcaggttgatgccattctcctgcctcagcctcctagtagccaggactacaggcgcccgccaccatgcctggctaattttttgtatttttagtagagactgggtttcaccatgttagcctgaatggtctcgatctcctgacctcgtgatctgcccgccttggcctccgaaagtgctgggattacaggcatgaggcaccgcgcccatcctgcagttgtttttttctggacctggatataaccttctgtgccgtgttcctgtgtctccagcagccaaaaccctgtggaaagccatttgcagaggattgtgttggggactctgcctctcctccttgtgctacaccacatccttgcatccttggtgctcatgaggcctccccaaatctgtgagctagccaggttcagcactgcacagcaggcccttccccaccaagcgctagccccctcattctgcaagcagtcccacacgctaattaccaggtgtgtcagacacgtgtgagagtgctgccttctcacaccaaagactacatttacttcatcaacatttctcttctttcaggtagttggcaaggagccaaggctgaggcagctgctgagcagagtgcttctgtagaagtgcccagttcaaacgttcagcaacaccagaagcagcactgtggagagaaacccttaaaaagacaagagggcagggtcccagttttgaggagttgcagagtccacctatcagagaagtccttgcaaagcagggaagttgggaaggatcttctgaccagctcaggtgttctcaagcaccaggtgactcacacgggagagaagtcacataggagctccaaaagtagggaggcctttcatgctggaaaaaggcattacaaatgcagtgaatgtgggaaagcctttggtcagaaatatttacttgttcagcaccagagactgcacactggggaaaagccttatgaatgcagtgaatgtgggaagttatttagccataagtccaacctttttatacaccaaatagttcacactggagaaaggccttatgggtgtagtgactgtggaaaatcctttagccgtaatgctgacctcattcaacaccagagagttcacactggagaaaagccttttacatgcagtgaatgtggaaaagctttcaggcataattccacacttgttcagcatcacagaatccacactggagtaaggccttatgagtgcagtgaatgtggaaaattgtttagtttcaactccagcctcatgaaacatcagagagttcacactggagaaagaccttataagtgcagtgaatgtggaaaattctatagccacaagtccagccttatcaatcattggcgtgttcacactggagaaaggccttatgagtgcagtgaatgtgggaaattttttagccaaagctcaagcctcatgcaacatcgaaaagttcacactggagaaaaaccttttaagtgcaatgaatgtgggagattctttagtgagaattccagccttgttaaacatcagagggttcacactggagcaaagccttatgagtgcagggaatgtgggaaattttttcgccacagctccagtcttgttaaacatcgaaggattcacactggagaaatacaatgattgtgagaaatcctttagctggtgtttcaacctcattcaacaccagaaagttcacagtgtaaaaaagtcttgaaggttactaatggaaatccattagctatacctccaaactcattcaacactggacagttcacagagtggacaatgtagtgaatatggtaaaaggcctcagccaaaggcctaaccgtattcaacaccagaaagtttagactggagaaaggccttagactgtcgctgaatcaatatgacctgacttaaagcagaaacagccaggcgtggtggctgacacctgttattctcaccactttgggaggctgaagcgggcggatcacaaggtcaggacatcgaaaccatcctggttaacacaatgaaaccacatctctactaaaaatacaaaaatttactgggcatggtggtgggcgcctgtagtcccagctactcaggaggctgaggcagaagaatggcatgaacctaggaggcagagtttgcggtgagctgagatcacgccactgcactccagactgggtgacagagtgagactctgtctaaaaaaaaaaaaaaaaaaaattagcccggcgtggtggcaggcaactgtagtcccagctacttggggggctgaggcaggagatttgcttgaacccgggaggcggaggttgcattgagccgagatcacgccactgcactccagcttgggtgacagagtgagacttcgtctcaaaaaaaaaaaaaaaaaacaaaaaaaacccagaaactctgagggtgatctttatgagggagctggcaattgaacatcattcatccaaatatgcacactggaggcaggatgagaattcctgatagattgttcctcctgagaaaatagccctctgtcttggagctccagagagagggagccctgtattggctgcaccagtcgaatggagttttaatctcactgagtttggagttgggggaggaaaggagtggtctcgattcagatgttactcacttttgctgttcttatgaatgttagatcttctttaataaatatttacttgccataaacccttatgtccgcttccagagactgaattgtgtttttataattttcaccagtttggctgcgtaacaggtcggcaaatctcctcactcagatattctgtaagttgatccaaatgtttcaaattttaagaacttgccaaattgtgttctaaatggttagcatttcatatttcctcctggaatatattagattttccatttcttcatattactgacagtttacatgtatggaagtcataggccattcattttaaccattttactaagtgtgcagtagtatttcattgtagttcttaatttgtatttttcgaatgactcagttttgagcatttttaaatgtgcttattcgtcacacgtatatcttcgttagtcaaatgtcagttggtattttttgcctgtttttttaaaatatttggttgcaagttgttaacatttctgaagacaaattccttatttgatataagcgttggcagtattttttcatggtctgtggcttttgttttctttctaaaaaattagagttgaggtcttggtatgttacatagactagtctctaacccctggcctcaagtgatcatcctgcctcagcctcccaaaatgctgggattacaggcatgagccaccatgcttggccttgttttcagttcttaacagtatctttcctagaggagattgtcctaatttttatgaagcccagtttatccatttgttatcttattccttgtgcatttggtgttctattctcttactataccatatctttgcctataaataaaagccttatgtgagtatgctactgtagtcttaggaatctttttaaatatccaacttctgaaatatttgtaggtttaactacagataaagaatttgatgtatatagataatgtgtacatattccctatcttttgtgagatatcctagcaagcagtggcattccagtagctttgagcatatttaatgcccagttattggcttatataattttttaataaaaggaagcagaactccttagagaagaggctgttttctggttgtggcagaaaaggtacaacatgagtctaggaaatattgcattggaaagtaaagagatgctcacagaataatgttgatgtattagctttctattgctatcctgacaaatcaccacaaacttacggtttaaacaacacaaatatattatcttacagttctttaggtcataagtataacacaggtatcactgggtgaaaatcaaagtgttggcatgattgtgttcctttctagagtctcatggagaatctgtttcttgcttattttgagttgttagcatatttaagttctttgtggttgtaggactgagattcctttttcttgatggcatcagctgagggtcattcctaaaacatgtaagaacttttatgaaatattaaaggaagaagtaataccaattatatacaaactcttccaaaaagagaaaagttcaaacacttctgaactatatgaaagttatcattaacaggacagcaaagaggcaatgacataaaactatagaccaataaccacatgaatatagacagagccttaacaaaattttagcaaattgaggcacttgtccttcaaatcaccccgctgggtctcttccaagtatacttccctttctttcttgttgtaaagcctttttaaataaacttgcactcatgctaaaacaaaacaaaaagacatttagcaaattgaatccagccatatacaaacaataataaatcataacctagtgaggtttatcaagaatagaagttagattcaacaattcaaactctttgttaatctgtattagcagactaaaatgaaaatctcaaaatgtaataaaagcattttacaaaattcaaaactcggttatgatacacacagcaaactagaacaagatggtgatttcttccacctgatacagcacatctatgaaaaacaaacagctaacagcacatttgatatatatgtgatcaaatatttgataagttgattttccccaacattaggaataacataaatatgtcaacatttatcacttctcattaaaaacaaaaagtcttaagattgtaaaggcagaacccaaactctttatttacatataacatgataatattgaaaattctaaattgtctactaaaaagctactagatctaataattgagtttagcaaggtcctaagataaaaaggccagtgtatacaaagtatatatcactattctaagttggtatatagctggcaaatacatgcttggcaactgaaaaaatgtacttcacaatagcataaaaatatgaaatatttagaaataaatttaacaaaatatgttcaagaactataaaaataaaacattcctgagagacattaaggaaggcataaataaatgacacaagaagttcctgaatctgagatttaatatttttaagttgtcagttttcctttaactgttctataggttgagacgatcccaataaaaacctaatcttttaaataaaaatttacaaatgtattctaaaaagttacatggaaatgcaaagggcctggactaattgccaaaacaattttatttattttattttattttatttattttttttttttttgagacggagtttcgctgtcacccaggctagcgtgcagtggcatgatctcagctcactgctgtgtctgccccctgggattcatgccattctcctgcctcagcctcctgcgtagctgggactacaggtacccgccacctctcccggatacttttttgtattttttagtagagacggggtttcaccatgttagccaagatggtctcgatctcctgacctcgtgatctgcccgcctcagcctcccaaagtgctgggattacaggcgtgagccaccatgcccggccaacaattttataaataagaataaatttgaaaacctttatgacttcaagacttatgaatgtacggtaattgagagagtaaagtattagctaaaggacagacatagagatgaacagaagagaatagagaacccggaaatacactcacacaacactctattgtcaatctcttttcaacaaagttgcaaaagtagtaaaacaacttcagaaaacagtgtagcagctttaaaggtagcataaacttaccatatagcttaggaatcttacctatagggatatccccaagagaacaaaaacatgtgtcctagaaatacttacacttgcatgctcagcagttttatttataaaagccaaacactagaagctgtttttcacacacacacacacacatacacacatacacacactcaaaactaaaatgtccatgaacagaagaaggaataatcaattatggtatatccttaaaataccattcaacaacataaaaaataaactatgaatacaagcaaaaacagcatagataaaaaaaagccctgagctgagtggaagaagccagacacaaaagttgacatacagtatgattccatttatatgaaatgaagaagctgcaaaactagagtaaaagaatgcagatcactggttattgggcctgtggtctgagggtgaaggttctgactgaaagagtacaggaaaatgttatcaggcaatggtaattttctctatcatgactgtgttggtggtttcatgacagtacagctgacccttaaataacacaggtttgaaatgtacaggtccaattatatgtgaattttatttcaataaatatattggaaagttttttgaatatttgagacaatttccaaaaaccagaattcattgaaataagtatgtcaagaatgcataatacaaaatatatgtaggtactattttatcatttactaccataaaatatacataaatctattatacaaggttaaaattagtcaagagtcacataaacacagactgtacttggtgcttccagagaaatgtaaacaaacacaagatgcagtattttttttttttttttttttttgagatggagtctctctctgtcaccaggctggagtgcagtggcatgatcttggctcaccgcaacctctgcctcccaagttcaagtgattctcctgtctcagtctcctgagtagctggaactacaggtgtgcaccaccacgctgagctaatttttgtattttttagtagagacagggtttcaccacgttggtctgtgttggaggtcaaaagaattagggtcatgaccaactcagtatgccactggagactatatgagcaaacaacaaactagtctcatgaatgcagtatgttggcaagcctacaactgtgtctgcagccagatggaatgctaagggcagtcacaccccaggtgcagtgttccttgtggttatctacaggaacatctggagtctgttgtataaagaaagcaattatgtgagcctgtgataaatcaagcagctgaccaactgttacgtcttcctctctgtggattctacctaataaatacaaagggctgtagaagctcagggcccttgttccctagaagcaaggagccctctgaccccttctttaaaacagatctttttgtcttcatttctgcatttgtccttcttcattcagtcccgaaccgacagccacaagtggcgcccgaacagggacgtgagtgaagaaggtctgctggagcagagaaagtgaaactgaccagaagaatgagaaaccccaggacaagtctgctggcagtggatataaggtcagtgccctaaagaggtactgggagtgggaagtttctgaatcagggtaacatagggcagaatttgtctgctgaagagcaacattatatgcagtcacttaaaggtttacttaaacaatctggtgctcaggttagttctcaaacactagctaagctgctgcaggaggttatcacgcataacccatggtttccacagacagacactcttgatgtggaaaactggggtgaagatttgcttacggcataggatatgagacttacaaattaaactattggcaatccaggatttaaaatgttaaagaaaatgagatatcagagcagacaaggcttaggaaagtccctacaggaaaaccctgatcctatatcaataactgggcaaacagatagaaaagggctaggtcgtcagatttctgatgtgggtcattgatatttctcctccacccactgctttgccactagagtggctaacaaacctgtatgggtggatcaatggcccctttcacaggagaaactaactcaactccatcagctagtaaaagagcgattggatgcaggacatattgaagagtcagcccctggaattcaccagtatttgtaataccaaaaaagtcaggaaaatggggactgctacatgatttgagagctattaatgcacagattaaaccaatgggtgcattacagcaaggtctgccatccctggcaggcatttccaagagactggcctcttgtagtaatagatcttattgttttttttactatactattacatcagcaggataggcctggatatgccttctctgtgccttctgttaatcaaagggagcctgtctcttgttatcaatggaaagttttgccccaaggcgtgcttaacagtcctacattatatcagaattttgtaggacaggcattaaaggagccttgtaatgtgtttcccactggctatgtcattcattatatggatgatattcttttggccgctcctacagatcaaatcttacatcagttattcagagaaacaaaacaggctttgactaaatggaatctcaaaatagctcctgaaaaggtgcaaaccacctccccataccagtacttaggcactattattactgaaagaagtgttcagcctcagaaagtagtcatctgtagggacagattacaaactttgaatgatttccaacaattatcaggggacattaattggctgcacccaatgctaggtattgctacttattaactcaaacacctttatcagaccctccaaggagattcttcattagactctcctcggcaacttactaaggaggcagaagctgaattatagcttgtagaacagatgcttcagcaacaacatgccacctggttacagccacaaaagcctttgcttctgtttattcttcctacctcccattctccaacaggacttttaggccaattcatacacaaatctgtaatagtattagaatggcttttttatccaatcagacagtgaaatctttgcaaatttatctttctttaattactcaacttataacaataggtaggcatagatcaaaaatgtttatgggatgtgatccagacaaaattattgttcccttggattcccaacaacaggccacagcatgggaaatgtcgactgcatggcaaatcactctcacagattttgtaggaataatagataaccattatccatcagacaaaattttgcaattttatgaagttcacccttttacccttcctgtaatcactcatcacaagcctattccaggcagacagacctattttactgatgactcttctaaaggctgtgcagctatttatggacctaagcatactgaaacaataaagacctctggagtttcagctcaatgctcagaattagtggcagttattcaagttttacagctcaccgctttatctcctattaacattgtctgtgattcagcctatattgtaaatgtagccagtcacattgagactgccactattaaaagcaccctagaaccagagctgtataatttgtttctaagacttcaacaagctgttcactctcatgctgctccttttcatatttctcatatttgctatcacacacaacttcctggaccactatctctaggtaacaataaagcagataaactaatcggttctgtatttcaacaagcccaatcttctcatgcattcctgcatcaaaacacctctgcccttactcgtatgtttcatctgccttgcagccaggcttgagctattgcgcaagcctaccccacttgccagcctgtccctggcgttgcacccatggaaggatgtaacccactaggcttggctccatatgaaatctggcagatggatgttacacatatagcagcctttggcaaactcagctatgttcatgtgactacagacacttactcccatatgctacatgtcacgtgccaaactggggaaacagctggtcatgtctgatgacattgtctgtcaccttttgcccatatgggggtccctacacaatgaaaaactgacaatggacctgcttatgttagtcatgcttttcaaaattttttacagttatgggcaatcactcataaaacagaaattccttacaatcctcaaggacaaggaatcatagagtgggcacatcaaacattacaatgcatgttgaaaaaacaaaaatggggactaggagaccagctaccacctcaaacaaaattacatttagccttatttactttaaattttttgactcctggtatggatattaagactctggcagaatgacattggcaaatgttagagggaaaaaggaaagtttacccaaaggtattacagaaatccccggaagaaggacaatggaaaggcccggtagacttactgatatggggacgagggtttgcttgtgtttttacaggagatggacaatccgtgtgggtgccctcaaggtgtgtgtgaccatggaacgggagactggagaaatccatggatctcaactgtgggcccagctcctccagtacgagccatgagctagttgaatctgaatgcaaagacagaacaaggaccgactggagtcacactgacatcaacccccataaaatggggacagctcaagaaaaccacacaggaagctgagaaactgctggagcaaaacccctgactccatgtttatggccatgctagctgtaatatcctgtgcggtatgttttccctgtgcagaggcaaaaacttattgggcatatattcctaacccaccagtagtacgaccggtactcgggagcaacactcctcctgagatatatcatgatcagggagcatggacaccaggacccctaactccccctgacagagagtgattagattctcagaacaatggtatcaattatactgcaccattggagggacttctttatgtgtcacccaggatgcatcactcaaccgcagttgccttgcaattcagtcccaagcatgcttgagttaccatggaaaaattatgtacctattaggccttagctctattaatattactggtgtagttactaatcactcctggccccatcacccaaattgtattgattgtacagaatgggctccctttgataattctcacccctgtccttggactcagtgtcttggccccttagctaaacaacagtccatgttaatgggagacattatcgactggggtccccatggtcatttagatgggagaagtgagaatcagacctcatggcataaattttgctggcactggtggcgaaacttgaacatctcttcgctacatcccaatctgctacacaacttgcttggcacagaatgggctttagcccacctttgcctcaatggcattatcaaggaaagagaggtccaattcaggagtcaatatggaagacagcactcccatttatgaatggcagcatttgggttgggacactatccaataatagtaataatgctcaatgcagttttaatgttacctttgtagaaaatactaccacacagtttacaatttgtatttttaatccgtatgtttttctagcagcaaaaaaggaccaactccgggtaaacaatgcccaatcgatttgtgatgcctgtcaactgtatcattgccttaatcatagcacaatacaaacacacagcatatccaccctaataattctaggtcacattcctggattatagattcctgtaaatctgtccgagccttgggaggccacccccgctttacattttgtaaaactccttcttattcagcttactcatcgtgctcgtagagctttaggcatgataatttttgctataatttccctagtcacactaataacctctgctgtgttgtcctcagtagcactgcacagctccattcaaacagctcaatgtgtgaaaaattggatgtgcacagccgaccaggaatggatgcttcaaaataaaattaacaccaagatacaaacagaagtggcaatgttaaagactactgttctgtggctaggataacaaatacaaagcctgaagttgcagcagcaattgcattgtcattttaaccctattcatatttgtgtaactaatttggaatataatcaaagtgaatatccaaggaactttgtaaaggcccatttacagggagttttacattcaatgttacttttgatattaatgattcacaaagtaaaatccttaacttgaataagcagactcaagtgcttcagccctctttaaaagcttgggcagaattccagcaaggtttagggagccttaacccttggacctacttcaaacagcacctcaatgtcttttttgtgattatcggaataatgttattatgtttctgttttttgttcatagtctgtaaaatcagctggaccaccaaccggcaattgagagctgcacagcctgcaattacctttattcaattaatacaaaaacagaaaaggggggaggttggaggccgaaagaatgagggtcgtgaccaactcagtataccactggaggctatatgagcaaacagcaaactgttctcatgaatgcaggatgctggcaagctgacaactgcatctgccaccagaaggaatgctgagggcagtcataccccacgtgcagtgttccttgtggttatctataggaacatctggaggctgttgtataaagaaagcaattatgtgagcctgtgataaatcaagcagctgaccaaccattacctcttcctccctgttgattctacctaataaatacaaagggctgtagaagctcagggcccttgttccctagaagaaaggagccgcctgtctccttctttaaaacagatctttttgtctttgtcttcatttctgcatttgttctcttttgttcagtcccaaaccgacagccataggccaggatggtcttgatcttttgacctcatgatctgcccacctcggcctcccaaagtgctgggagccaccacacccagccaaagatgcagtattaagtcataatcgtgcatgtgtgtatgtgtgtgtttgaatagacagagtctccctctgtcgcccaggctggagggcagtgacatgatcatagattgctgcatactcaaactcctgggctcaagtgatccttctgcgtcggcctccccagcagctgagaccacaagcacatgccaccacactggctaattttaaaatgttttctgtacaggctgggcatggtggctcacacctgtaatcccagcattttgggatggttggcaggtcccagaagtttgagaccagcctgggaaatatagtaagaccccatctctacaaaaaaacaaagacaaattagctgggtatggtgccacgcacttgtggttccagctactcggggagctgaagtaggagtatcacctgagcccaggaggttgaggctgcagtgagctgtgattgtgccactgcactccagcctgggtaacagagtaagaccctgtctcaacaattttctgtagaggcaggggtctcgctatgttgcccaggctactctccaactcctggcctcaagcaatcttcccaccttgagctcccaaagtgctgggattacaggcataagccatcatgctgggctgataaaattaactacaggacatactacagtaccataataattttgtagacatctcctgttgttcacagtgttgtgagtattcacttaaagaaccccatgatgttaatcatctccacatgagcagttcatctctccagtaaatcacatattgcagtaaaaagtgatctctcaaggttctaatatattattcatagtgtttagtgcgatattgtaaactttaagtaacgctatatggcctatatgaagtgccagtagtgatgctggaagtgctcccaagaagcagggaaaagtcatgacattataagaagcagctgaactgcttgatatgtactatagattgaggtttgcagctgtagttgcccaccatttcaagataaattaatccagtatgaggatcattgttaaaaacaaacaaaaaaggaaataaagacattgctgcagctatgccagcaggcacaaaaatcttgcattttctgcaaaatatatcttttatctcatttaaaaatgcagctttcatgtgggtgcagaattgccatgggtaaggcatacagagagactcaaatacgatttgagaaacagtcattatatgacaactcaaagcattaggaaggtgaaggatctaaagctggagaatttaatggcagcaagggaaagtttgataattttagaaagatgtttggctttgaaaatgtcaagataataggagaagcaacttctgctgactacaaggcagccaacaatgtcccaggtgccattaagagaaccactgacaagaaattatatcaacctgaacagatttgttttttgttttgttttgtttttgagacagagttttgctcttgttgcccaggctggagtgcaatggcacgatctcagctcactgcaatctccacctcccaggttcaagcgattctcctgcctcagcctcccaaagtagctgggattacaggcacccgccaccatgcccagctaatttttttgtttttttttagtagagatggccatcttggccagggtggtcttgaactcctgacctcaggtgatccacccgcctcagcctctcaaagtgctgggattacaggcatgagccactgcacccggcctgaacaggcttttaatgcaaataaagtgccctgttttgggaaaaactgccacaaaggacatttattagtaagtaagagaagaacataccaagatttaaaacagaaagggataggctaactccagtgttttgttcaaatgtagttggttttatgataaggactgcccttatctataaaactgctaaccccaaacccttgcacaagctgtcagtcttttggttgtacaacaagaaggcctggacaatgagaaccattttttctgggttgttcccattaatgctttgttcctgaagtcaggaagtgccttgacagaaagtaattgcctttaaagttcttttgacattgtacaatgcccctggccagccagaaccccatgagatcaacaccaaagttgtggaagtggtctacttgatcctaaacaccctctaatttggcataaagatgatggagtcataagaatctttaaattaggatccctaatccccacattgttcaagggtcaactgtatatattgaccagtattcattgaactgtacattttaaactggcaaattttattgtgtgtaaattacacttcattaaatctgcttaaagagaaaaaaataatccatgagtccacagacataaatgaatgaatgaatgaagtaggaaagaaaaagttatactttatagtaaaatgtcagttaaaatagatggagatagaaaatcatcaatgagagctaaactggtgaagtaaaagattaatgaggaaaaggagttttatatatttctaaagaatctttcttctggccgggtgcggtggctcacgcctgtaatcccagcactttgggaggccgaggtgagcggatcacgaggtcaggagatggagaccatcctggctaacacggtgaaaccccgtctctactaaaaatacaaaaaattatctgggcgtggtgatgggcgcctgtagtcccagctactcgggaggctgaggcaggagaatggcgtgaacccgggaggcggaacttgcagtgagccgagatcgtgccactgcactccagccagcctgggcgagagagagagactccgtctcaaaaaaaaaaaaattttcttctatttatttgcatttatatagaaaaaacagtagagagaatgtaaacaacccagtcaggaggagactccaacactgaaaaaaattcatgagtaccatatttacatgttttaaaatcatatttcgtcagaattatattttcacaacgatagatatggtaaaaatgattttgcactttcttacagtaccacaaaacattttaatggagcaagagatttctttttttttttttttttttttgagaaggagttttgctcttgttgcccaggttggagcgcaatggccctatctcggctcactgcaacctccacctcaccggttcaggcaattctcctgtctcagcctcccaagtagccgggattataggctcctgccaccatgacaggctaattttttgtattttcagtagagacaggctttcactatgttggccaggctggtcttgaactcctgacctcaggtgatccacccacctcggccccccaaagtgttgggattacagacatgagccaccgcacctggcggagtgagagatttctaaccataactgagattttgcttattcatataacttaatggtttatgttacaagataaataaaaatgattagtatttggttaaaaaattttaggctggacacggcctattatctaagaaattagatatatatcttgcatacaaattcattactagctgtgttatttgtagatattttatgctaatcatttgtagctcctctttttaatgttaacaagatattttgaagagcattgcatttaattatgagaaaatctaatttcttaattttcctgttacagtcttgtttggtgtttttatgtaagaaatatttgcttcactatgatcacaaagattttcctccattatctcctagaagttgtatggtttggccgggcgcagtggctcacgcctataatcccagcactttgggaggccgaggcgggcggatcacgaggttaggagatcaagaccatcctgactaacatggtgaaaccccgtctctactaaaaatacaaaaaatttagccgggggtggtggcgggcgcctgcagtcccagctactcaggaggctgaggcaggagaatggtgtgaacccaggaggcggagcctgcagtgagccgagatcgcgccactgcactccagcctgggcgacagagcaagactcagtctcaaaaaaaaaaaaaagaagttgtatggtttttggttttacatttatgtctatgaattatttcaagttaatttttagcatagaacttgctggaacatgggttaaatggtcaggaaaagtggtaaattaaggataaaaattgctacattctttggaaaatgaaagcaaatagcaagatgatagtgttattcatagagatgaaagtgactgttagacttggtgataaaagctgagaaaactgctcattttggagcacatttaaatatctatcacagaggcaaattggaaggtcagggaaaaaaattggaaaaatgaatctagaactcaggtaacagtaaggatggttgggaaggtttaaattagtaaattggaagatttcatagaaaactcatgaaggttaagtgacctgaggatgcagaagtgaccactgggctaaagtgaagaacaaatatggagagaagtggcaggcttgcatgatacacatgcgttcagtaaagcaaacacatcacaacccagtgagtattctcaatatcagcacatctcttaaactagcaccacaatcaataatgaaaatccccttcattcaccaatgggttctaactcctagaatttatgatttctagtgctctgtattctaacatatattttgctcatctttgcattttgtactcttttgcttaattctcagtggcatatcttcatttggagagatgtcttttaagtctagtggtggcttcttgtcatcctggtcctactcctcctcttcctcgtgttcctcttcctccttctgttctttctcttcctgctccttgtccctttacatctttatctttatttttaccttcatcttcatattctttttcaccagaaatccctcaggttgaccaagatggtggtatgtagctatatgtgccacatgtggcctggagtgtaggactggtaagatgtgactcataacaatatggatagacgatgtaattctgggtttaaaaaaaaaaacctctgcatgacctacacttcagaggcccttagagcttcctcagtaaatttctgttcatttgtgtctctttgggttggtttcctacctggggatgtgacaacatggatcacaggcgttacagtttcaaggtacatttccatagaagaggatgacaaaataattgcctttacatagaaaatgagtcataggaggtttctctttggaattcttaattgtttaccaacagtttccctaaatgcaccaagattccaccctcacatatgtggcactaggctacacgaacttccagctatgacaggaagcatttaagtttctgctgtaaaggaaagaagagattcggggcagaaagcgtcctgactctggggcattactgaactcccctgctgaggaaggaattttggggccaaacagcaacaataagtctatcaagcgtatagcaaaaatattcctgatagtgtcacatgccccacaatatagagatatctaaggataattaatatcaaggtctgaagtgagataattatggtgggcctagaatatgtgaaaacaatgtcacaggaatggcaagaaccaaatgaacagaaataatagagactgataaattatttcaagtcctactctgagtaattactcatgcatcacaacaagaatgattacttcaaactttctgataactatataaacacatgtaaagaaggaagcaatattttccgtattatggattctttgcgtagctttctgaaattcaaaactaaatattgcaagctaactaaaagagatggaatttcttctagaatatcaaccaatacttcaagaaagttgtttaaaaatagcagaaaggtcaatataataaaataagtcaatatcaatattccactaaatcatatttaatgcagatattcatttatattttaaacagtcaatacgtaaagtacctacctgattgttcactttaaagctggtgcaaattaaagtaatatgaaggataataatgctttgcagattactctttaaaaataaatgaaagagatatttagagaatatgtgaacttttagaaaaacacaaataagaaaaaatgtgacaaagtttgaatgaagtaagatttattcattcgtttatgtatatatttacttctgaggcggagtctcgctctgtcgcccaggctggaatgcagtggcacggtctcggctcactgcaagctccgcctcctgggttcacaccattctcctgcctcagcctcctgagtagctgggactacaggagcccgcgaccacgcccggctaaatttttttgcgtttgttttgttttgtttttgtttttgttttttttttgagacggcgtcttgctctgtcgcccaggctggagtgcagtggcacgatttctgctcactgcaagctctgcctcctgggttcatgccattctcctgcctcagcctcccgagtagctgggactacaggcgccaccaccacgcccggctaattttttgtatttttagtagagacggggtttcaccattttggtcaggctgtctcgaactcctgacctcaggtgatccgcctgcctcggcctcccaaagtgctgggattacaggcgtgagccaccacgcccgacccgtaaaactcttaaaataagaggatcatggccgggtgcagcggctcttgcctgtaatcccagcattttgggaggctgaggtgggccgatcacctgaggtcgggagttcgagaccagcctgaccagcatggagaaatcccgtctctactaaaaatacaaaattagctgggcgtggtggcacatgcctgtaatcccagctactagggaggctgaggcaggagaatcgcttgaacctgggaggtggaggttgcagtgagccgagatcgtgccattgcactccagcctgggcaacaagggcgaaactccatctcaaaaaaaaaaaataataaaaaaataaaaggatcagaaataaataatagtggagacaaacgattgtgatgccctaccttgttttaacctgattgtctctctcagctgagagagccaaacagactccatttttgtttcttcacttgcagcccccttatccccctcccttaaggacataactagtgcaagctgactccaagcacatccaggaatgcacttactgatagacactgaggcacgctgtaccagcagctcctaggaacgcactcagttaatggtacccaaagcccctgcgtttatcactttgtgataattaagcccctgcacctggaactgtttattttcctgtaaatgtttgtgtaaccatttatcttttaactttttgcctgttctgcttctgtaaaaattgcttcagctaaactccccctcccctatttagatcaaggtataaaaagaaatctagccccttcttcggggccaagaattttgagctctagctgtctctcggtcgctggcaataaaaggactccagaattagtctcagagtgtggcatttctctataactcgctcggttacaacactatagccaaagattacattcataaagatatttttacaatataggtgtcttatttaatatgactccaatctaaatggtaatttttctaacctttcttaagtaattataaaatgtcaaaattataaacaattaaaaactaaagagaaatgaagacaatggatagcaacaaaagctaattgctaaatatgggggaaaaaagccaggcatggtggctcatgcttgtaatcccagcactttaaggcaggcgaatcacttgaggccggttctagaccagcctggccaacatggtgaaaccctgtctctactaaaaatacaaaaattatccgggggtggtggcgcatgcctgtagtcccggctactcgggaggctgaggcaggagaatcgcttgaacctgggaggtggaggttacagtgagcagagattgcaccactgtactccagtctgggcgacagagtgagactctgtcaaaaaaaaaaaaggaaaaaaagaaaagaaaaagaagatataatgtttctgcaatctcatttcagttccacttatgataatagatacattatgtaatttaagtcactaacacttgagggcaaaaaaacagaataaacacaaacgtgtgggataaggggatgctgaccccactgttagtgatcaccttggttggagacccaggttttatcatacagatgaagcctgcaggtagcaagtttcagagaaatagattgtaaatgtttcttatcagacttaaggtctatgctgatgttattgctgtaggggtagaatgaggcatgtccaaccccttcttccataatggcctgaactagattttcaggttaactctataatgctgagaggagggggtccattcagatagttgggaggcctttgaattttatttttggttatagtttctacattaaaaaaaagaaaaaaattaagggtcgcgtcaattctcaattgtcaacatttttaatgtattgtatgcaatatatgtcaacttttgtgttgagaaatgaagatcaaatcgtattcttttatcctgtgtatgtaataggctttgctgaccctagtttgatgggttttttcctttgtcctctctttcttggattgagtcctcacagcgcggcggactgcggcgtggtaggaactacaccacccagaatactgtgcgccgagcgtgccggggccttagaccaatcattgcccaggaaaggggcacctccgtaagtgcgcaatacgccagaatcttccggcgtctttccggtggtggtcgtttttgctgcctgcgagcgcgtccgcgggctgggcgtttccggctcgctgggtccgggccaggtaactggagccggaaaccggtggaggtggtgtccgcccgcagaggagcttgcctggtctcggtctgagcgtcgcccagcgatttgccaccgcacgcacgccggatcccgggctttaccgcccgcctttccaggccccgccccgcctaaagtcccatggccgaggcagcgctagtgattacgccgcaggtgagagcggagtcctcggatcctcacctgggtcctgaggccccggactggggtcacctgcgtgggtctctgcagttcaggcctcttctccaggacagcgaggagttctgggtggggtcctcagagctgacgggcggtgaggtgaagaagggagagcgttgcgtaccgtgggggctgcacgcgcagagcctgggaggtgcgccggggtcgcgagcattcggaaacttgggggcggacctgtgtctgcagggagcagagagaatgaggagaagaaggcacggctgccatggcagcctgagcaaccggggtttttaattctgagtctttgggagccatggagggttgtgaactaaaggagaacacgatctgagtgagggtctgaaaaaatatttcaaaggcaatgagtggagaaaacagactgttacggagtgatgggggtggacgcagggatactggtgaggagactgctgtagtaggctccaggaggattatggtggattctggaccagacgggttgctgaagggacctaagtaataagaatcttggtagatcttaaaggtaaagccagcaggattttctgctccatcatttgtgcctatgagcaaaagtgggagtgaagtatgatcccaagtttttcttttacctgaacatctggaagagttgacaaagaaatctggtgagggagcaggtttcagggaaatagtaggagttgaattttggacgtggtgtttctaaattgccacagagtgaagttgttacatgggcagttggaatcataagtagaaaattcatgggaggggactgactcagtgatgtgtaaatggagacaggctggggcgtagactcaagccaagccttaaatttagacgggaaatcttaaggttttactttgagatgaagagagggagggctgaggctggaggctgggaaagtgtgggtcggccttggcgaagctgcctgcagataggagggccatggggttccgggggtacttccaaagggaatgtgtaaggaatacacactgcataggatggatttgagggtgggacactgtgtagagtcaccattcagaagacttggcgaactgttcactctatgtggagccagagaaaggtcagccagactagcagagaagcccaagcccagcaagagcagctctcccaggaaaatacaagtttagactgtatagatttaacaaattaaatttatgcaagcaattagttaaccgaataaaatgtcactataactctgtgctctaataaaaaataaatgtttgttttttgtcatgctttcctggcacagaattcctaaaatcgttgtaatttcctcagtgaaaagtgtcttgtgataagtcatggaccgcataacaacagtgttgaccacatcagtgacggtggtcccataagattatgataccatatttttactgtaccttttcattttctttctttctgatcaggaggcaaactgcattttctaagtttataaatgtttaaatgcacaaataattatcactgtgttacagttgctgacagtatttagtatagtaacttgctgtacaggtttgtagcctaggagcaataggctataccatttagtagttgaacaatgaatgtctgaacagtagttcccccttatcctcagaggatacctttcaagaaccccagcggaggcttgaaactgcagatagtacccaacctatatatactatgtttcttcctagactacatacctgtaataaaatccagtttataaatgaggcagtataggagatgaacaataataactggaaataatatagaacagttatactttataagttaataaaagttaagtaactgcagttgagacaataaaaaagcaaaagttaaattataaaaaacatgtgaatgtggtatctctctaaatatcttactgtactattcacccttgtgatgaagaagggactaaactcgatagagtgagatttcctcacactacttacaatggtgcactgttggccagcgcagtggctcacacctgtaatcccagcactttgggaggctgaggcaggcagatcacaaggtcaggagatcgagaccatcctggctaacatggtgaaaccccgtctctactaaaaatacaaaaaattagccaggtgtggtagtgggcgcccgtagtcccagctactccggaggctgaggcaggagaatggtgtgaagctgggaggcagagcttgcagtgagccgagattgcaccactacactccagcctgggcgacagagcgaggctccgtctccaaaaataaataaataaaataaataaataaataaataaataaaggatggtgcactatttaaaacatgaattgtttatttctggaattttaatattactattttcagactgaagttgaaatttaatacttataattttcacactgaagttgagtgtgggtaactgaaactgcaaatagcaaaacagctgataagggaagacttctatacttgagttttatgagatggcttagggtgagcagacaaggtggagtctctagatagcctcagagtggagtcagtcaccagaaaaatcaagtgattatagaatttgaactttgagccccacctctggcatccagggaggggagcagagatctggagattaggttatataaaatcttgaacaatgagttctagaagcttcaaggttgtgaacacttggaagtgctgggagagtgacgtaagagagcgtggaagtactctgccttaccccctctcccagtaccttgccatatgcatcgcttccatttggctgttcctgagttacatccattatcataaactggtaaacataagtaaaatattttcctgagttctgtaagtggttctagcaaattattgaacgtaaggagagaggtcatggcagcccccaaatgtgtagccaagtggagaaaattacagtggtctggacattggcttgcaattgccatatgaagtgagggcagttttgtacgactgagcccttaaacctgttggtttagctgcaactccaggtagttagtgttagaataggattgaattgtaggacacctagttggtatcagaatcagagaatggtgtgggaaaagacactacatatttattatcaaagaagcacagaagcctctcataatttgaaaagataccacattcacataaagacttaaatggcaagtaagaaacaccagagttttaaaaaatgtttacagaaatcttaatgcaatagtcagtactagctaaatcttagcattggacacgtatgaatgagtttgatgcctacgatggcactacgagatagccaccattaagtgtttccattttacagatgaaggcaacctcagagaggttaggtctttgtctagtgtcacacagttggcaagagcaacttaccctttgtaaatgccaccttgaacacctgtatttcatagcctccctcttcctacagattcccatggtaacagaagagtttgtgaaaccatcacaggtaagtggaagaagtcccaggtcttcactggccctgttccctaaagccatgggtctggcccacagatgcaggtaacaataatgtcctgggactctttttccttcatcttgggtccctggggccacctcaggcccaggatgattaatcagggtcaggagttatacagagatgttcccatttctgcatccaataggatgaagtgatgaaaggtttcctgggcataggcgccagcatgtccaaatgcttagagatgagaatgatatgggcatatatagggaactgcaagtctgtgcactgtggccaaaacttttgcagtttgagctgtgacagaactaacatgagtttctttttccttctttacaatctcacagatacatgatttgtccttttcgtagatcttagcaaactcagagtacaatattttttttcttgttaagaactctcaccttttcacttaaaggaagtacttcacaggttgtcttttacatatctgaatggctggtattatcgctcttgtgctttgggggtattaagtaaaataagcgttacttgaacacaagcactgtgataatgagacagttgatatgataaccaagatggccacatagtgattaacaggcaggtagtgtattcatcatggatctattggacaaacggatgattcacgtcttgggcagaacagcgtgggacagtgtaagattttatcacactactcagagaagcacgtcatttataatttttgggttgtttatttctggaattatccatgtaatattttcagaccacagttaaccagtagtaagtgaaaccatggaaaacaaaattgtggctaagatcggggacgactgtatatgtattcagtgctatacattttattctaagcaccgcttcgactgcatctcacaaattctaagttgtgttttcatttcatttagttcaaaatatttttaaatttatcttgagtatttcttctttgttccatgcgttgtcttgtttacatctcccaggtattttgggatttgccagctctctttccattactgctttctagttgaattccattgtgattgcagagcagaccttgtattatttctagtaaatttattaagatgtgttttataactgtgtattgtaaactggggagtaaatgcccttcgtggggtctctaggatcattccaacactgccgtggaaatgaaactctgagaagcataaaggatttattatattcataggtcctcatagagggtggcacagcaaaccatgcatggagccatatggaaatagctctcagggagtggactcaaccaagcaggcagggagccaagagggagagcaaggacctgtgggcaggtgcctttcctactgtgtttgaatgtcattcagtcacagtcaaaggatgaaaagaaggggaggttgtgacagggaccagtcttagcatgctggggacctggtcaccggggtgggttgctcataatgtattggggatgttgaagcatcaggaaaataggaagttttaaagatatataaaacaggcccagaatgtggtctgtcttgttgaatattccgtgtgagcttgagaacagcatgtattctgttcttgttggacaaagtaatctaaagatggtgattatgtccagttgattgatggtgttgttgaattcagttaagtttagtggttttctgcctactgtatctgtcagtaacagaaaagagtgtggaagacttcaattatgatggtggattgatctgtttctccttgaagatctgtcagtttttgcctcatatagtttgatgctctgtggtcaggcatgtatgtgctaaggattcttgtatctttttggaaactgcctcaacctcccgagtggctgggattacaggcgcccgccaccacgcccaactaatttttgtatttttagtagagacagggtttctgcacattggccaggctgatctcgaactcctgacctcaggtgatccacccgccttggcctcccaaagtgcctgtgatgttttcttgatagctacacatgatgagctcagtaaaaggaattgctgtaaataggcctttaataatgtggtggtgaggtgtgtcagcgggcaggggaagcattttaagtcccacagttaggtctcagtgttttagtgagcctgttcctcttgactgaaattcacatgtgtttctaaattgtgtttattatgctttttctctcccattatgtggaagaggaatactagagtgggttgtagttggttatttcccttcccccagatagattaggctctgataatacctctgcaggttaggctctgattaactgttgtctcccaagggcaggctttgtttagaggaacacattgctatggcatattttaaaatgattcattttcccctctctgctggaagcacaaggggatttttttttttccagtattcaccatgagaacttggttaagtttctggaggtaaatattgcaagattgtgggggccccctatcagagtgcctcctgaattttcagctcacagaattgtccacacagaccttccagcaatttatgcattatagattgggttttcctaacctagcactggtttgcatgatggtttcctttcatgagtttctgctcctgtgagccttgattctcctgtatgccctcgtttgtctctccaatcttgtgggcagcagtgtgtgctgtgcccttatctttcctgtgtggatcctagaattgtccatttttcagtctgtttaactctttacttgctattgtgatagagtggccacttccaagctccttacatgcagaatagaaaccaaagtccaggagttaggccttcacaatgtggagtctcatgttgggacttcttggtggtggtgttaggtgcacagcaagagacagacacgtggagttcagggaagggatccaagtgaaagctatccgtcagccagtggctggcctgtggaccatggcagatttaagaggaacactcttcaggtcatagtggcagtcccatcagtgaggaaggatgtagagagtattctctaatgactgggtctcttgcatggtcacctagatagaagtgggaaccatcactaagacagataaagaagagtagtaaccatgggtgtgtgggggtaggatgaaacgggtgtccagctgttggcacagtctttaaatggggaatgttaagagattcattcagaggcaaagcagtaatggaggtcaaataacaccaaggtcagggctggtgcttttcctcccttttgctggctcagacttttgttggtaactcttggtagggcctaagtagtttcagacggtgtgacagattaggttaaaagcaaatgagattgactgggagagtcattcagcctgtggtgggagcagctgggggccaagctttgactgagtataggtggagagaggaaagatatgactggtgtggggacagcacaggcaacactaaggaggaagtggactttggcagcctgagctcacacaaggtctgagtggctgaaattggaacaaagagccaggccacatggggacgtcttcataacagtcctgagactgcctctgacttgggtctaacaaagatgtgaggtggtgctggatccttgttgcatttagcaagcgctgcctggatcccttgagcagagtggcatgtggagaagccaggtgaagtacctgtgtcatggatgctgagggcagtggagttcaaggtgtagcagtcacgatctggagatgtgttcccatgaatggtgtgcaaccggggagggagtatggctgtactcaggatcctcgtactggcactttaaaccaagatggtaagcacaggtttcagtatctgggtctccagggaggtgaactagcaggagcatggatgagattccatgatgtaaggcccagagcccagtgggagacaccataaggacctggtatctcctctgagttggagaactagggaggagcgagatttactggggttcctggggattgagtctgctcatgatttcatctgcccccatcatgcagggccatgtgacctttgaggatattgctgtgtacttctcccaggaggagtggggcctccttgatgaagctcaaaggtgcctgtatcatgatgtgatgctggagaacttttcgcttatggcctcagtaggtaagatctcttaaaaccacaccatcaacctctgctggactctgctcttcccctttttccaggagtttcctgtctttcccagagttggacatgggcccttcttctttccttggttcttgacctgtggaagacataggcgttgtggttgccaggcctgggttttttctgccccaacatctactgtcctgaagccttttagttaagagtttgggttcagactcttgtaacttgcccaaccgacaccacttggttttgccactccttgctaaggtgactgttcagttctgtggtggacctgtgttacaggttctccccctgcctttagtagacgtgtctttggacctgcctttctcaggaattacaggtacttacatggttgctatttgtagggaaccctagactatgacagcaagaccccctcccaagggtttttttgtaataaatttccctcctgtagtctgtcatgggttggcgcaccctgggccagtgttgttgacccacctccctgtttttcccttaggatttcttctaccttccaggacccagatagtctcctgacttaagctggggacaggggagaggcctgtgttcctgaaagcgtagtgaagtcttcagccacagcaaggggggttaacagggtttgggacctgtgagtaggagcagtgggagggcatgatttgagggctgaactcaaatcataccaggcaaatgtcctatgttccccactattttggtgccagggctcatggccatacctcatttttctcttttctctgcctgcttgacaatttgcctacttgtcgtttctactgtgattgtcccctacctctgttctccacatctctcctgttcctgttctgcagtgttctccaacattagcctatacctaatgtatttaatattatgagctgtgcagatacagatgttcctcagctcgtgatggggttatatcctgataaacccattgtaagttgagaatatcgtaagtcagaaatgcatttaatacacccaacttattagacatcctagcttagcaacacagtagagtgtcagttgtttagcctggtgattgcatggcttactgagagctgcagcttgctaccactgcatcacaagagtatacacactgcgtatcactagcctgggaaaagttcaaaattcaaagtatggtttctactgaatgtgtcactttcgtatcatcataaagtggaaaaatcataagttcaaccattataaatcaaagactgtctacttaagctctcaaacatcagctatccagttgtaattgcattttcctggggtgacacacattctatgcaggtctcccctgtctccatcagatgacgtcctattgaaaaccattgacagagaagggagttgtatgccccctgcctctcttcccaccatagtaccccattccttgttctcttgctggttatgggtcttcccctacatggtaaccttaagaggcctaatactgcaagtattatcttccttgacctgactccagctcccttgtcctgaaaacaaacccatggcctgggtgcaatggctcgtgcctataatcctagcacttggggaagctgaggtgggaggatcacttgagctaaggaatttgagaccagcctcgacaacataatgagacctgtatctccacaagaaattctaaaaaaaaattagccaggtatggtggtatatgcctgtagtcctagctacttgggaggctgagatgggagtgtcactggagcttggaaggtcaaggctgcagtgagatatgactgcaactgcactcccatctgggtgacagagcaagaccctatctcaaagaaaaaccatggactcgtccctccctgtgttccacaggtatttgtaatggagctgttcccttctaccaaagtctgcatatacttcacttgcatttttatgcttttaggttgtttgcatggaatagaggctgaggaggccccttctgagcagactctttctgcgcaaggagtgtcacaggccaggactccaaagctaggtccttccatcccaaatgctcattcttgtgagatgtgtatcctggtcatgaaagacattttgtacctcagtgagcatcaggggacacttccctggcagaaaccttatacgtctgtggccagtgggaaatggttttcatttggttctaacctgcaacagcaccagaaccaggacagtggagagaaacacatcagaaaggaggagagcagtgccttgcttctgaatagctgcaaaattcctctgtcagacaatcttttcccatgcaaagatgttgagaaggattttccaaccatcctgggccttctccaacaccagaccacccacagcagacaagagtatgcacatagaagcagggagacctttcaacaaagacgttacaaatgtgagcaagttttcaatgagaaagttcatgttactgagcatcagagagtccacactggagaaaaagcttataagcgtagggaatatgggaaatccttgaactctaaatacttatttgttgaacaccagagaacccataatgcagaaaagccttatgtgtgcaatatatgtgggaaatcattcctccataaacaaacactcgttgggcaccagcagagaattcacactagagaaaggtcttatgtgtgcatcgaatgtgggaaatccttgagctccaaatactcacttgtggaacaccagagaacccataatggagaaaagccttatgtgtgcaatgtatgtgggaaatcattccgccacaaacaaacatttgttggccatcagcagagaatccacactggagagaggccttatgtgtgtatggaatgtgggaaatcttttattcattcctatgaccgcattcgacaccagagagttcacactggagaaggggcttatcagtgcagtgaatgtgggaaatccttcatatacaaacagtcacttcttgatcaccatagaatccacacgggagaaaggccttatgagtgcaaagaatgtgggaaggccttcattcacaaaaaaagacttcttgagcaccagagaattcatactggagaaaagccttatgtgtgcatcatatgtgggaaatcatttatccgctcgtctgactacatgcgacaccagagaattcacactggagaaagggcttatgaatgcagtgactgtgggaaagccttcatctccaaacaaacacttcttaagcatcacaaaatccacactagagaaaggccttatgaatgcagtgaatgtggaaaaggcttctaccttgaggttaaacttcttcagcaccaaagaatccatactagagaacaactttgtgagtgcaatgaatgtggaaaagtcttcagccaccaaaaaagacttcttgagcaccagaaagttcacactggcgaaaagccctgtgagtgcagtgaatgtgggaaatgctttagacaccgcaccagcctcattcaacaccagaaagttcacagtggagagaggccttataactgcactgcatgtgagaaggcctttatctataaaaacaaacttgttgagcatcagcgaatccacaccggagaaaagccgtatgaatgtggtaaatgtgggaaagccttcaacaaaagatattcccttgtcaggcaccagaaggtacatataacagaagagccctagcaattgttgggatgtgtaattgtcttattcactgtaggacaccagagagctgatttttcaagggatccaacagacagaaattcaccctcatacatctgcatatcactagttgaaagattcactacaaggtccaagtacttgggaagctttctagagattacttgtactttctaatctgcccagtgttacaacagacactaccatgtggcatatcctcaccgttttcatcagtcactcacatgtgctcaaggaatgcagaccactgtgcttaccaaattctgaagggaataatataataaaagcctgttgagggtcctcttccatcttgctgaactgttcgaggcaaagacaaaacccaactttgaccaagaagagcaatctggattcttgtagcccatggaggtttaccttcttcataggttttttttttttttatgtgattgccatagtgggatattccctctcccacattacccaagagggaaatgggctgtcttaccatgtgctgatgtatgtgctctgccagtgtgaagggtgaacagctccaactttatgtccccccagggacatagtatgagatcggaaaatagttcttagtcctgtttgtcttaatttttattggtttccaaggtctcctaggaaggagagcagagctgtgtggtcctaatcatggtgtcgatgccagatttatttgtaggtccagaggtctccctgagaagaggcatttgtgacaaactcaagtgctgggacctgcatgaattgtttatttgcagtgatgcttcatatttcccagcactgttcatggtatcttatttcccaggtccttcattgtagccatgggcactgaaggactgaattggtaggtaggtcactggttgtaagacctactggggccaggtaagaacagtaattggcccagacaggtaggtgtgataaacagagtagaaaagattgtggccaagaagagtgaatgtgtcccatccaaaggtgcatccagatatgtctgtgttactatggcttcatggtttgggggtatatagaaattctcaggacctcagacctttgattctcctttagcaacacacatcgtcagcataaggcatctaaagattttgtggactcataacttatgtactgtttttgagatgattgctgcacgggcaggaaagcaggatttgagagaacatacaccttgccttccagatatgtggtttttgtgattcacccagatctgttgtgccagttaggaattatctttattacttcccgtttattgccactgctgagaaggctgtccttcctaacttgtgaggagatgaatccttaataataagtaaatcttgtgttatcctatagtctggttttccaaaaggagaggtagatgcatatttttgtgtggaaccatttatcttaaaacattgaggtgcagttttcatacacaaaaccttctatctttttaagaactgtctgtatggtttattgcccagttaatgggttttgatagtcatgttatctcagtaagtgtcttgtcttagaaatatgtgtgtataggctgggtgcggtggctcatgcctgtaatcccagcactttgggaggccaaggcaggtggatcacctgaggtcaggagtttgagaccagcctgaccaacatggtgaaatccagtctctacttaaaatacaaaaattagccaggcgtggtggcgtgcatttgtaatcccagctacacaggaggctgaggcaggagaattgcttgaacctggggggcggaggttgcaatgagccaaggtcgcgccattgcactccagcctgggcgacagagtgacacttctcaaaaaacaaaaacaaaaacaaaaagaacagataagaaatacgtgtgtatatattctattttgtgtgttttcattcaccttatttcattcagtcttccaaatgaaatgttcttaattttgatgaagtctaatttgtctgtttgttcatttactgttattttggtgctattaaaaaaattttattccttggctgggcacggtggctcacgcccataatcccagcactttgggaagccaaggtgggccggatcacctgaggtcaggagtttgagaccagcctggccaacatggcaaaaccccattctactaaaaatacaaaaattagctgggcatggtggtgggcgcctgtagtcctagctagctacttgggaggcctaggtgggaggactgcttgaacccaggaggcggaggctgcagtgagccaagattgcgccactacactccagcctgggcgacagagcaggactcccatctcgaaaaaaaaaaattgtgtaattataggaactttggaaagattgttattcaactgatattacataaggtatttattttgtaaattatttgcaatattagaatttctgtcagcctacagtatttctctgctgttattctgaccttaacacattgaaagagttcttaattttgcttcgccatcccttacgcatacttaatttttgttattttgccaaattccaattatctttacaagatcattttattttttaaaagagctaaccagacaagaaaatttgcccttgttattcccacttcctatatagcttgtctgccaaaacctttatgccattattctcatcagtctcattctcaggggtttctctgagcaaatccatataaaagtggaactatatgacatttcctgccccgttctcatgcttcatctttaataggtaaatttaccattttaaatagttttaaaattatcttcactgtgtgtactttggatttaatccttactaatgattaagatgctctaagaatcaatgtaaaactaattttaaagccagcagcataattttgtgagttatgcctgagtattcaaaaatcctaacaagtcaaaaatattaattaaaatcaatatgtttaatctttccaattaaatacttccattccataaacttcagaaccaaagttagataccaacaagagactgaagataaatacagtgtcaatagtatcaagggactagcccatataatatacttgaaaatcgtattaatcaccaataaagtaccccaccataaacaaaatacacaataaaaagtcaagatacaaataaagacaggccaacatatgagtagaccattgacagaagaggaaaaacaaaaggcaatgaaaggatatgaactaatgttcaaatgtatttcaatatgagaaataccagatatattctatatcactttaaacttctaaagtaaaaactggaaagctgggtaattctaaatattgtctgggacacagtgatacagaaacacttttgtccatcttatgggagaggaagggcaatgtataacataattccagttacatactagatcaccatatgacctagccattcagctgcaaggtacatttctcatgtatggccataagtttatttagaacataatactgatgaccttatttttaaggttgaatcaagctggtggtgatatatttcatagcaggaaaatggaggaaatacatgtccataatcagaggatttgaatcaaggatgaaagcttcatgatgtaaaatattacatggcagttaaaaacaattggctagaggtaagcccatgaaatataggatagaaatataatattttgctgtagtttgagtgaaaaagaaaaaaaaagaattgtgaggtctacaataaaacataatttaaaaataatttaataccacaaaaactccaaagaaaaaaaaccaaaacaacccagacacttcttactagaacatatgttccatgcttctatctcggcttctggtagccccgtgtgttccttggcttgaagatgttcttcctgtgtcttcacatcgtcttccctctgtacatctgcctctgtgaccaaatttcccatttttctaaggacacagtcatagtcaattaggaactaacctaatggattaactaacatgattacctgaggttctgagggtaacgactccaacatcttttttggagacacaaacacttaacattgccctatgaatttctgcagttcttcaaagggcagagtgaataataaccacagcaatttcaagacacacaggcttccattgtgagatggcttgtttaaagaaactattaattccctacactcttctgatcactctgttgttcacattcattttaggatttctcttccaaatcacttctggtgctttccttcttgcttctttcatttccttcggtgttgtagttctattatgtttttattccgtcagcaatttcttaaatttctcttttcaaccttaagcagtttttctgaaattataaaatttactgtgaacatttcaaacatttccacatgtgcatgaagttaaagtgaactctgacattcccctctaccccatcccttccctccctctacacccaaggagcaaataccatttaactgggtgaggatccttccagacacattttttgtctgcttacaaatattaagatttctaattcgtctttgcatgaccgacttgccgagttaatttaccgtccacatttcctctgtgacatttactgattgaagtgcaccaactgtgaatggtcataactagtcccacccccacaatcatttctcacagattaagcagcataagagcatagtgctttttatctaatttgttcattaaatgtaacaaagttacaaaaacatgaacatgaaaacgttttacctctgccgggcacggtggctcacgcctgtaatcgcagcactttgggaggcagaggcgggtggactacatgaggtcaagagttcaagaccagcctggccaacatggtgaaaccccgtctctactaaaaatacaaaaaaactagccgggcatggtggtgggcgcctgtaatcccagctactcgggaggctgaggcaggagaatcccttgaactcgggaggcagaagttgcagtgagctgagatggcgccactgcactccagcctgggcaacaagagtgaaactctgtctcaaaaacaaaacaaaaaacatgttttacctcaatcataaactgtggaaaacatacagaagttcacaacttttactgtaagttcaaaacttctactgacttaaaaacgggtgctaaacaagtttaagtcaatatattgcacctgttctcatgtgtttttcctatattagacagtaagttccttccctgctcaagggcaggacccatagcccagccatccactgcatcccactcttctaagtatgaccacaacagtgagtggccatggagctaaatgacaggtgtctcatgagattcttgcctatcacagcagcaagttcatagtagatccttgtaccaaacacttcagtgaagactgtatggaaagagctggaagctaagaaaaacctagggtgtcctttatcccatggaaaacactcctgctttgggacaaactggggcctaggtcctcaggcctggaaagaaccctttgatgacagccaatatgtttctagaggggtttctccaactctcttgaacccagggccttaggtacaagtacagccacagctacaatacatgcagccttccagagagaggatgcaggagggtgggggtcctcaagagtcaactctccttcccacaggagaggaaactgtgcactctgtcctgaaaaaacaaaaacagagaactcttaactcaccaagaattctatttataatatgtgcaaaaggaccacagtaaaaggtacatgcccactatgaaaacatgaatatatatgcagtgctttaaaaggttgtgaggaaagctcaaagtgagaaaatgataattttctatttttcacacgttttaacctaacattatctcatgtagcttgaaaactaaaagaaaatctcacaaaaggaatttcaaattaccagattcaggctaagtacagtggctcacacctgtaatcccagctttttggcaggctgaggtgggtggatcacctgaggtcaggagttcgagaccagcctgggcaacatggcaaaaccctgtctctactaaaaatacaaaaattagctgggcatggtagtacatgcctgtaatcccagcttcttgggaggctgaggcaggagaatcgcttgaacccgggaggcagaggttgcaatgagccaagatcgcactcctgcactccagcctaggcagcggagtgagactccatctcaaaacacaacaaaactaattaccatattcagtgctagcaccaagggactaaggtcatggtggttaactatgaaactcacgtaaacctgcccacgtatatcctgattcacctgttaaaatgctaggcactttattttgtagcaaaacttcacgcaaatgtttataagatcagacaatgagattcctctccatgttgttttcttgggtttactgggtttaccatggattcatcttagttgtgtgttttattttgcctgttttagctataattcaatccctagaaaaatgctgagggggacctaaaaatacccctctacacaggattaaagaatctgataaacaccagaaagaattaggactcatctgagaaggccaagcaagtacaaagtgatcactatgttgccagagaaaataaagacaacaaacagacagaatggaatcaggaaaatgtgagagtgctgagcatttgaaaccatattaggctaggtgtggtggctcacacctgtaatcccaacactttaggaggctaagcaggatgatgacttgagtctagcagtttgagacaaatctggggaacacagcaagacctcatctatacaaaaaaatttaaggctgggtgcagtgactcacacctgtaatcccagaactttgggaggccaaggcaggtggaccacttgaagccaggagttccagaccagcccagccaacatggtaaaaccttgtctctactaaaattacaaacattagccaggcgtagtggtgtatgcctgtatcccaagctactcagaaacttgaggcaagaggaccatttgagcccaggagttcgaggttacagggaactatgatcatgccactgcactctagcctgggtgacagagcaagtccctgtctcttaaaaaataatgagtttattaataaaaatcaaagccttaaacagtcttaggtattgcacattttaatgtggtgcacattttaatgtggccatctgtacatgggttcttctcaccctagatataaaaaagaagtgtcacatgaagatgttctcagtattctaatttctactaaattcaagaatctcatgacacaagccttcatatttctcacaaagaattactctcctcatggatatcctcccagagatgtctggatcaaaggcaacttccaagaaatgcctgaagagctgccctcactgtctaactctgacaaaggatggcagtgaatgtatgttaaaaaaaaaaaaaaggaataaaacccctttacctctcaaacattcccctaccaaaaaataaaactgatcttacagggaagtctgtaaggacataaagcaagaagatacctgtaactgaaggttttcataagttcatagagaaaatcccaaggtgggtcaaattccagcatggctctttataggacaagcaagtgacaacctggtcacaaagttttctcacatcaataacaattatgtagtaacttttcattatgattctcagatagtaagatttctgctctggccaaagactgtccttaatagttatatttggaatgtctttctccagcatgagttctctgatgttgatggaatgccttccacatttccccctggtatgaatccttctgcaatgagtgagaactgagtggtgactgaagggatccttacattcactgtattcacagggcttctctccaaagtgactgctcatgtgttagttaagaaagagctgacaaaaaaaatgaaaagtttcctgacattctttgcattcgaaggacttcttcctacagtgtgggtcccattatgaatgataaaataacagtgggtaaaggccttgctgtattcattgcagcaatagggttctctcatgtatggaccctttggtgctgcagaaggtgtgacctgcgtttgaaggccttcccacactcgatacacttgtagggcatctccccagtgtggatgacagagtgctgaatgaggtacgtgctccggtgaaaggctttcccacactgggtgcattcatagggcttctccccagtgtgaatccgctggtgctgtatgagttctgagctgcatctgaaggcctttccacatgccatgcaatcatagggcttctctccagtgtggatgatgtaatgttgaattaggtgggctctattgctaaaggctttctcacattctttgcactcaaagggcttttctccagtgtgggtcctattatggcgaataaaagtagaccggtgggtgaaggcctttcgacattgactacactcatagggtttctctccagtgtggattggatggtgctgcatgaggtacgacctgcgtttgaaggccttcccacactcaaggcacttgtatggtttctccccggtgtggatgaggtagtgccgaatgagagttgagctctggctaaaggctttcccacatgcattgcattcatagggtttcattccagtgtgaaccctctgatgtcgaacgagataccacttcctgttaaaacctttcccacactgcttgcatttgtaggggtttgtccctgcatgaatcaaggcgtctttccctggttgctgtgagtcacattcatggagaacatctgctgataaccactcttgtaatgccctggagtgcagaccatcatctgtccccaaaccttcaccttcaaggctcactttcccaagatgggtctccttgtggaggtctgtctccggtgtcactttacctttctgcatttccaaaagcccttcctcatccctagctctccccaacctcgaatcacttgaggttgaagattccagagtcaggcttccccggagaaaggcccgctcagataagactggcgggtaagtggttggctctctggtatgaacttgtgctctgtcacctgaagggcatcaacaaacaaaggaggggtcttttagtgataaaatatagaaaaacacaaaataaccacttcagtaggaaaatgaagatgaaaatagtgcctatgatacttgctgcatttttacatctctaacccaggttaccaaatactgcttacggtccttgtatccttgacaccattaaagggaaaatctggagggcaggctggaccgggggacagaggatccggagtaaagacatttctctttacagttcagagtaaggaagagataatagagttttgatgacattgtctgaagggcatttgctttaagaattgaacgcttacatccatctgacaagggattaataaccagaatatataaggagcttaaaccactctataggaaaaaatctaagaatctgatttaaaaatgggcaaaagatctgaatagacacttctcaaaagaatacatacaaatggccaacaggtatatgaaaaactgctcaatataattgaccatcaaagaaatgcaaatcaaaactacaataaggtatcatctcatcctagtcaaaatggcttttgtccaaaagacaggcaataacaaatggtggcaaggatgtggaaaaaagggaaccctcatacactgttggtgggaatttcaattagtacaactgccatggagaacaatctggaggttcctcaaaaaactaaaaatagagccaccatatgatccagcaatcccagtggaggtatatacccaaaagaaaaaaaacatcagtacatcaaagagatatctgcactaccatgtttactgcagtactaggcacaatagccaagatttggaaacaatttaagggtccatcaacaatgaatggacaaagaaaatgtggtgtgtatacacaatggggtactatttggccataaaaaaggagatcctatcatttgcaacaacagggatggaactaaaaatcaaaacaactgaactcatggagagagagtagtaagatggttactggaaactgggaacggcagtaggatggagtaggatcctactccatggagtagtgaggatggttaatgggtaccaaaatgaagttagaaaagaatgaataagacctagtatttgatagcacaaccgggtggctatagtcaaaaataatttattctatactttgaaataactaagggtataacgggattgtttgtaacacaaagaaaggataaatgcttgaggtgacagatacttcctttaccttgatgtgattattatgcattgtatgcctatattaaaatatcttatgtacccacataaattaaaaattagccaggcgtggtggtgcatgcctgtaatcccagctactcgggaggctgaggcaggagaatcgcttgaacccgggaggcagaggttgcagtgagccgagattgcaccattgcactctagcctgggcaacaagagcaaaactctgtctcaaagaagaaaaagaaaaataaaaataaatgaagccttttggtgctataagagtttagggaagttgcacctaatgagactggaaagaaaaagagatcatggaaggctttctagaggaggtgtcccataagctgagtcctaaaagagaagccagagtcattgccagagagaggaagtgggcaatgggttgaaggtgaggaagtaaaaatgggtagattcaccctttgggcaccagatgcctggtgaaaccaatataaaagggtgattagagttggagcaagaaaatgaagattccagcacaaaagggatggaagtacacacaggaacaaatggtacaaaaggcctagtgtagtaagatctgacaagtttctgctgtgtcaggaggcacaatgcatggcagacaagagggtactggagacagaatgactcagttcaaatcctgcctgtgtcaagtgggttgatactggaggatgactttctccaccaggtctccaattcctcaactaagagactaggagactcaatttctcaggctgtcatgaggttaaatgagaaaatgcacagttcttgatgcagcgcaagtgttcattaaattgtgggacattacccttattattttcattgctgcgctgggcaatttgggtaatgccagtgacactagcaagaacaacttcagtgctgtgatctgaggaagctagcagctgtgcttcatgaagtggccagcatcgcatgcttagaagacccgagtgcagcagcagtctcatacctggaatggtggggatgggaaatggtgcggctactctggaaaaatatttgggggtttgacttaaaactgagcacagatctgtctcttgactccaccagtcatctcctgggtgtatatgcaacagaaatgagtgtttatatccactaaatattatggaaaatagtattcatagcagcattcttcataatctccaaacaaggtaaacaatacaaatgtcaaccaataggagagtgaagaaacagatcctgatgttttcacataattttatggtacacagcatataggataaacccagctcatggacacaatgatggtgaaaagaagaaatacacaaaagagaaactgctttggggctccaattatgcccattcacaaccaattaaaaactagtccctagggagagagtctaaacagtggctcccactgcaggaggagctattgacaaagacagggtaacagaaactgccgaggtgctggaaatattgtaaatcttgacctagatgaagaattcaatttgcagaaatgcaaaaatttaagctgagcccttcaaatttgtacttattattgtatacataagattttttttagtttgagaaattttaaacaaaaaaatattaaagtcaagtgtaaacatctcttccaaacatgagacaactccaagaagcttggctttacaagtggggtcaacacaagttacagggtattgtaggtgaaaaagcattttgtctgttttcgccaagtgtaagcaatttgagtacacttttttttgtttgtttaaacttatattcactttctggttttgtattgtgcacactttttatttgaatatagataagttgaaggtacagacaaagcagagattttttttaaaaaaagcaagttccctgagaacacagcaggtatgatgcaggcactggcaaagacactgaccatgactagaggtaagatctcctccatagaggacaagagaagccaagtatgagaccgtgcagatgaatctttaagaacattaaatacacatcctatttttaacatgaaattaattatatactgaaacatcagctgctggggaagtggtgaaaatctgaaacacatctgagtggctgcaggagccggtgcagggacaagagctgcccagaggaatggggcagatgtggggagacctgtcaggagcctctggtatggcccaggcagaagattatgagagcccggactagggtgttggtgaaggagccaagggaagcagtggaagtgatggacttaggagatatggatcatttaaaatgagcaggactagggatgaatggatgctgggtttgatgaaggtaggtggagtccaggagctatgtggtgtgtttccagccttctaacctgcttggatggtaagacattctctgaactgagtgtctttttaggcatcaggagctaaaggtgcctctgagacacttaagtggagatgtgggattgagggaatgggaagggaggtatttggaacacagggttgcagatggggctggccaagaagcccaaggggagagcccatgactcagtggtgatacaaatccacaaggcaaatggctccagctacactcatcagcacagatgtagggcagagaaggccaaatgtcaccttggtgtttctcagggcaagaggggcaggaagatatggagcaaagggctgcttccgagtctctgatggtctaactggaggatggatgagtggacggagagggtggaaaagagtgggattcacagcataatgcagacagtaatatcaaggggaggaaagtcccctttctcttgagtccagaaagaaatgtatgacattacatttatgatgattaaaactgttcatgcataatactaactagctgacatttgttgatcctatggaccaggaactgaactaagcagtgtcatgtgttatctctacatcctctaacaactcaatgacacagaaattatatcactctgattttgttgagtagaggagtctgaggtgatgtaaaccaaacccattaattcttttccatgggcacatagccaaatcacatttgtcagtcctgagcatctaggtgtggccaaatgcctagttcttgtcaagactatgtggttgtcaagtatgtgtacaactgggtatgacttctccccttcttcttgttccccttctaccagctggattgagccagagcaaccataaagattcctgttcacagcaaaaggtacctgtgtctctgaataattgtgtggctcagtgctcacctgatgatggacactatgacccaaagtgagtcagaaacaaccaggcccccggaaagccacaatgagcagtttcacacagaaattcagaggcagtggtgccctcacattatctgaagactgccatgactccacatgaccagctggtggctgcttacctgcacaggtagcatgtgagaggcctctcttcactatccacagctcctgcccatgctctagcaggtggaccaactctggtttgggaacccgatgccctgttgatagcaaaagaaatagaataggggtaatttaatgagaaaatgaaagtctctccatcttgcctaggacttcatgacagggtccagacatgaatgcagctgctcccaaagtaagcaaaatgctgatgtgagccctgaaaatcaagggcattgctctgagtgagctgtgttccccataaaaatcatatgttgatgccctaacacccaacgtgactgtatatggagacaggatctttagaaggtaattaaaattaaatgaggccacaagggtggagccttaatctgataaaattatggcctcataaaaacagagagagatctctcctctgtccctccaccttgtaagaacacagcaagtcagccatctgcaagccaggaagagaggtctcaataggaatcaaatttgccgacaccttgatcttggacttctcagcctccagaagcataagaaaataaactctcgttgtttaaaccacccaatccatgacattttattatggcagccaaggagataaaagacaggcacaaatcccactgttgggctacaactgccatggagggtagtgctatctgtctacacaacacccactgcccatgacctccgtctatggaagccaacgttgttcaggcacacaacactttgacagccatgggacacggcaaaggtgtgctgcttcctccagaaggcattttctttctttctttctttctttttttgaaacagagtctcactctgttgcccaggctggagtgcagtgctcggctcactgcaacctctgcctcccaggttcaagggattctcgtgcctcagccacccgagtagcagggattacaggcatgcaaaaccatgcctggctagtttttgtatttttaatagagactgggattcacaatattggtcaggctggtctcgagtgcctggcctcaagtgatcctcctgcctcagtctcccaaggtgctactgcacccggccccaggaggcattttctaacaaatctaaatcattgcttctcaaacacctcgtgctttcagaaccacttggggatgcgtgattccaacctcaaaccaaatgaaacaaaatttcttcgtgtgagacctgggcatcagtacttccaaaatgtgccccccaaaattctggtgcccagatggggctgcaaaccactggctgaggctggacatggtggctcatgctgtaatcccagcactataggaggccgaggcaggaggatcacttgaggccaggagttctaaaccagcctggccaacatggtgaaaccccgtctctaccaaaaatataaaaaattagccaggtatggtggtgtgcacctatggtcctagctactcaaggggatgaggttgggaggattgcttgagcctaggaagcagaggctgcagtgagctgagatcatggcactgcacttcagcctgaatgacagagcaagactccatctcaaaaaaaaaggaaaagaaaaaccagtggttgaaataaattggtaatgcaagagtcttcattaggcaggtgaccaaagctggattctcattgtgaaaagaaagcatttattccaaggtgggaggatggattgaacatgggggcctgctgccccagtcaaggctgcagcacccagcatccctatgaggagccagcctgaggacaatcagaagcctgaaccaagaagaaggaacagagaaccaagacatccttgatggcgtcactgggctgcggcaccgaacaagcctggagccaaccacacctcaggcttctcatcaggcgagttagtgaatttccttccaggtgaagccagtttgatctggttttctgttatatgcagccaaatgctttccactagatgtggtgagtaaaagacaggaggattctgtatagaagaccaatgactgaggtacaaggatccacagaaacatcgactggcagattctgaaccatagcccaggattccttcagacatgtcacagtaaggtccaccaatgtgtgctacatgcctggctttgagttctgggacagggctgtgggaaaggtgaatcagatgatcctttggctctcccaagagctgagctccctgtcacttttcacacgctggttcctccacctggaacactgttaccctcttccacctccttctatccagctaactcctactcagctttcaggtctcagctccactgtcacttcctgagatgccctctttggaactcccacaataggttatgacatcctgcttatttattcctaaattcccctcatttttctttctagaacttatttcagttgtcatctatggattgatgtccaccttcccaactgaactcagagtgtgccatcaattctaataacttctttatcctgacccacttttgttaaatattgtattctaaaagggaaccttgttttgctctggtaagtgagaaagtcaatttcccttcctacaaatagaagtctgcaatcacaacacaacaaaatcaaaacaatgccactaagtcccaggaaacccttgtatgtttcttagggctaagttggaggttgtcccctctgttaaaaaaaagaaatgaactgcactgggggagtgaaaggaaaatgaaagactcagcgctgatctgagacttttctttttttttgagccggagtcttgctcagtcacccaggctagaatgcactggcgcaatgttggctcactgcaacctccgcctcccaggttcaagcgattctcctgcttcaaactcctgagtagctgggattacaggcgcgcaccactgcgcccagctaatttttgtatttttagtacagacggggtttcaccatcttggccaggttggtattgaactcctgacctcgtgatccacccgcctcggcctcccaaagtgctgggattacaggcgtgagccaccacacccagctgatgagacttttatgacaagaattagcgtgctggacagagaaagtaaaaggaatggctttatcagggtatcaaaccatgccatttgaggacattcctgtgtaccctctaaaaacacctcctggatcaacagagcatggatatcaagcatcagaaaacaactaatgaccatgcaggcacccagatgcctttttacagagattgtattgcttaggaagatatccgaggggcactgaggacaaatgtcttctggggggctgcctgactcacccctttctctaagaacagcccatcacccatggcccctgcttaatagggctgtggccacagctgaccccaccaggatggccaatcagcttccttcttatgcaatcttgattaaggacctcagaatgggctgagcactggagtgagggtttgtgttaaaaggacattttctaccccgacaatctctgatgcagacaaagggagaccagtcaggaagaggtgggaacagaaaggtctgtcaagagaaaggtgggcagttccagtgacctttttgcctggccaagaatcagggttagggtcctcctcagggatgagaggtgagtcattacctagtgaaaccagaagcccacaggtctccagcatcacctctcggtacagggtcctctgggccaggtccagctgtctccactcctcccgggtaaaggtcacagccacatccttgaaggtcaccaacatctggaaagtcaaacagaagtaatgctattggccttgtgttgtcgcataggatcagaacctgtcactcagtctctagtcaatgtgcagagagatccaggtctgaatcaactaggtctcctttgggctgacttccgtgcagggctcaaaggggaggcagatactgccttttgacaatgcaattgtgcctgagagaaaagccttctatggggaagctgttgaagatgacacaaacaatggcaatcccacgaggactatgggaagcagagagtaagtactctggcatattaaaagaatggaggaaaatgactgatactaatccaaccacaataacagcaacagcagcagctaagtgtgggggaaagaaaaatagatcagaccgttactgtgtctatgtagaaaaaggaagacataagaaactccattttgatctgtactaagaaaaattcttctgccttgagatgctgttaatctgtaaccctagccccaaccctgtgctcacagaaacatgtgctgtattgactcaaggtttaatggagttagggctgtgcaggatgtgccttggtaaacatgtgtttgcaggcagtatgcttggtaaaagtcatcgccattctcccgtctcgggtacccagggacacaatgcactgcggaaggccacagggacctctgcccgagaaagcctgggtattgtccaaggtttccccccactgagacagcctgagatgtggcctcgtgggaagggaaagaccttaccttccctcagcccgacacccataaagggtctgtgctgacgaggattcatgaaagaggaaggcctctttgcagttgagataagaggaaggcatctgtctcctgcttgtccctgggaatggaatgtcttggtgtaaaacccgagcgtacattctatttactgagataggagaaagccgccttatggctggaggtaagacatgctggcggcaatactgctctttactgcactgagatgtttgggtaaagtcaaacataaatctggcctacgtgcacatcgaggcacagcacctttccttaaacttatttatgacacagagtcctttgctcacatgttttcctgctgaccctctccccactcattaccctatagtcctgccacatccccctcatggagatggtagagatagtgatcaataaatactgagagaactcagagactggtgctggtgtgggtcctccatatgctgagtgccagtcccctgggcccacttttcttcctctatactttgtctctgtgtcttatttcttttctcagtctctcatctccaccttgcaagaaatacccacaggtgtagaggggcaggcacccttcactaagtcctctggtcctcactgtgtccctgccaggctaaggcttccttagccgtggtaaagcaaataaaggcctgacttaaatcaggcctcctgaatctgacacttgccagctatgtgactatgacgatgtcacatgatctctctaaggctcgatttccgaatcaacacaataactattcccatctcagcaggcagctctaagaactaaacagaaaatgttcacttaggcaatcagtggagtgcctagcacatgtaagtgcctgatgtgtttgggaactttattaatcccctgacaggcccagaggtaaatgtcgttatcacttccatttcacagtcagcaaaggctcagggagctttagaaatcaggcacagcctcacatttaaaaagcaaaagcagcatttgagcaccgctaaaacacctcaccaagctgccagagagcaggcaggtgggagtgaggggtgcttttagctacagccagcactgccaggatgggtgtggaactgcagccccgcagagacctgagaacaatgtctcagacaaagggaagtgcaagggcaaaggctgaaaatgggaaagagcttggcaagctcaggattccctggatgaatgcagtgagaaaggggacaatggaagaggagaaagaagatgcggtcaaaagggcaaaccaagtacagccttgcagaccatgctggtaggagggggtggatttattggaaatgtgatgagagtccctataagagaggcctattcaatcatcaaccatttattaagtacaataaatgtacttaagcctggctgttctgggtcttgggagagggaagcaacaggcactcacattccagggttggaaaaagatcctaaacaggcaactaaataaatgagtaaggcaatgtcagatggccttaaagattcagatgacaagaaaacagagcaaggagaccaaagagactctggtcagctttaaacggtgcaacagacgagacctctttaagcagcggacaccagagggagtcagaaataaagcaaaggagggagaggtggatgagaaattaacaactacgacaggagctgacagtaatctgggctatcatgaaagtaatcagagtgactgctagagagtaaccctgggcctcatgtgttatctccaaagggacactacatcctgcataccatcgccactgaacattttaatggactcgtttttcacctgtaactaaatgtcttaaacaggaaaatatactgttagttgcaacccagcgtcccttgccctaaactgaaagacaaattcctcagcctgccctaccaccttttctgccctggcatagcagcaaccgcagaaacgctcctcccacctctttcagccgctgcccttcgtgttgtagagacaggaggccaaggaggccagagggtcagactcctgctggggttgagtctccaaacctagcacaggcccagggagcagctccggaaacaacatcctgagcgacgtccccggaccgtgctgtgcactgagacggacacacacacatcacccagggagccgttcaagcttcctcaaccccgggggggggaagagtaaatatttctactttgcgcgcgcaaaaatgaaggacgaggacagtaacgggacttgttcaaggtcgcaggcccgagaaaggacatggttggaagagccacgaggaggactgcggtcgctcctctcacctgtgaggggttccgggaccctaaaagccctatttcataccacaacgccgcgcaccccagaaacggggacgctccccacgccaccgcgggcctgcattccggacccgggaccgcgcgacccccttctaggcctctaagaagcaacggcagggactgcactgaggacgaccctgaaacgccgtccttccgctcgtcgggcccgggacactgaggccgggtggccgcggggagccgagccagtctgctcacctgcgctgcgtccttcgtctccgccatccgaccgttggcaggacgaggccgcgtggggcagctcccacgggctcaaaaccctaccccgggtcctacaacggtgcggaggtgagccccagtcgccctaccatccttcccagcacagttctgagagcgcggaccaacacgccccaccacaaacgtccacgccagcgaggccggaagtcccgcccctgtgtcgcggtcgcctgccacgccttttcctgcgccggcccactgccttctaggtaatgtagtcttgtcccgtaagaggccaggcttggctctttttccttttttattatgcacaccatgtttctgtatatctcagatgatcttagcggagcaagtgtacacactggattgtaaatttttaaaacttcctattattcggatgcctcaacgtccctacaagcaggctgtgagcactcgcccaggcacccaggtaaacgagtttgataaagggggccctgccacgaggttccccgcttgcctcctctgagtgacccagtgacattcccatgtaccagtaaaatcttacgcctggttactgcgtcctcctccaccctgacgccaggcactgtccctgggactggcgtggatctggacccccgcttcccgcgtggagccattcccgggacatgctcgtggggttccgtctgtgggacgtctgcctcctctgtgtggactggtgttgcccagggctcaggaaggtctccaggggccgtgagtccccgcccgcttccggagtccagcttcgtgacaccatcgtgagaaagaatgcagggatgagtcaaaatgaagccaaaggcaagaagcttttattgggaagaaaaagtacacatttttgagaagagtgtacttttcccaagagaagagggaaatgcggacgtacgagggagagcgggtcatgcacaatggagtttgggtttctaattttatgggctcttctaattagggggtgggataatcatgaggtttttctaggaaaaggtgggaatttcttagaattggggtgccaaccatttttatactaaatgtgggcgtgcttggattggcctggcactggtgggtgtgtgatttaatgtggcaatgagtgtataattaggtctggggtaggaaatgggtcaaatctagcgtcatgggacagcctagccccaatcctgtttgttaaggtctcatcagcccagtcttcttgttggagtagctaattttaacagcttgatgttttcccccttctcctgtgaccacacagcattcctattttgtgggtgtttctttaattagagagtggaataattattaggtattctggaaaaggagggaaattcagggacccacctggttactgccccctttctctcttatttggctttgcccagaagagtcatggacatgtcatcctgactgggattttggccattctttctcttattttgggttttctgttatcctatggtttctttgcctagttcttgtttttatttgttgttcgaatttttccatcctcctgcaaccacccagtgctattcctatatcactgtgagtataaacaccctttaaccttataggcttcttgaagtataattcccaagaccatgttgcagtggtccttaaagaaccaataaggcagagagaaacaaacatgttccaaattttgttctcaggagtaaaccttactcaattgttaaaggctgtagctagctcaaaagaagtttccttgactctgaaaaacaaaacaaggatcagcaatgttccaagcaaaagtcaaaaagattatttcagtttttctattagttcagcctattctgttaactcttgttctgcttgatatttataaacattttagcttttcatgagtcctgtatgtttttcagttatcagaaacctgcatttaggaatacctgttaaagtattcctacatctgattatgaaccatattttgaagaggattaaaacaagacaacaattgtctgtaaatgacaaaatgtccagggtggttagtcaaaaacatgattgacaaaaaaaatttggttatctccgtggtttacaataacaacataacaaccttaattgtggttgatagtgtatactttcacattagagttttctaaatcccatgcagttttggaacacatattaatagtatttgctgaaatataacctgaagaagattagacatcattttggcaatcccatgtaacaaaacatgtcaaataatcctgcttgcctcttttctggatgccccagggaccctctgtagcatccaaaacgtaggtgtcaagaaagacaattgatttgtggaagcctgttaaatatgttaacaggcttaaaatatttgatgttatgtactagaattccagattactataagttatttattttgccaaaatgatgactcaaaaatttgaaaaagcaaaaacctttcattagcctttactattacatgaaaattgtgttcaagagagagaaagccaaatttcacccttacattagtgtactattaatgtcaaccacaatttttaatgaaacaattataggcaattctatccaatcttaaccagtttgacaatgaggtgagattttcacaaaccttttataaccctttacaaattttgctaaagagtagattcatgcattaagagttctttgttgtgcttttatttcaatgctcaatttacagaaaaccacataatacccttttgaatgtagtcaatatattcacacagagtttcctttgcaagattaattcttacaattttttccccagtttgcttaaaccttcagttgtattttatctactttaagacaattctttatccctaggcaaaacgtacattgccatgccttcttataattttttacaaaaaacacattttactgtttttacacacattgcatgtaaatctattcagtagtctcaattacatgtcataatggtaactcttagcaattttttttttaagatggaatcttgctctgtcacccaagctggagtgcagtagcacagtcttggttcaccgcaaccaccacctcccaggttcaagcgattctcctgcctcagcctcccaagtagctgggactacaggcacatgccaccatgccaggctgattttttgtatttttagtagagatggggtttcaccgcattagccaggatggtctcaatctcctgacctcgtgatctgtccgcctcagcttcccaaagtgctaggattacatgtgtgagctaccacgcctggccctacctcttagcaatttttaactttagtgtaaaacctggtaagttgttttaattatttgctgggtgcagataaagtttaactccttccagaataagttaggggcttggttacttccatatgttcccagactttacccattgtgaagcaggcaagttgaacagttcttaaaggccaaaggagcagtacaaccttaaaacatttagcaaacctaccatctgacctgcataatttagaccacatatttacatcttgagtacatttgtattttaccaataatccctaagactgttttatttttaaagattaaagtcacatgaactaagagaaattacagtttttactattctttcaaaaaagatttgatcggccaggcgcagtggctcacacctgtaatcccaacactttgggaggctgaggtgggtggatcataaggtcaggatattgagaccatcttggccaacatggtgaaaccccatctctactaaaatacaaaaaattagccaggcatggtggcacgtgcctgtaatcccagctacttgggaggctgaggcagagcaattgcttaaacctgggaggcggaggttgcagtgagccaagatcgcactactgcactccagcctggtgacagagcaagactcagtctgggaaaaaaagaattttatttgatctaagtgcttataggccaatcaattacagctcttttttatagacatcacacaacacatatatgactacacagacagaagaagatccagcagctcagggtggagccctttaagaataaggctacaaaagcatgcagtttctggggcctaataaacaggcatagctcgaaggccaaaacagattttgagagggatttatccatctctaattcttggggttccatgaggaaaacagatttcccccaaattgaatctgtggcaccttgtctgttttctcaaggagtccaaggccaccagaagtcatccttgagcctttcatgcatgcaccaagattggcaagacagagtggagaaaagtaattcagttgactgagatacaaaccttttccagaaaaacaagatctaagaagagaaaaacataaaggcgtttcaaggacacctataacttgggtatccacttttaattaagctgagtgctctttcataaaattcttctttactaattaaaactttacagataatataaacaatgatccttatcttttttttttttttactggtttgcatcactctttgttcacaatcatgttcaggttctccagtttacttttggggaaagtggctggattcaggcaaggacaggtttttaactggactgtagatccctctaacagcaagccctgatatttgaagaggcaattgtctgttagccagagacttcccttagaggatagcagtcctgctatattatgtggggtctaaacagttattttccggctgggtgcggtggctcatgcctgtaatcccagcactttgggaggctgaggtgggtggatcaaaaggtcaagagatcaagactatcctggtcaacatagtgaaaccccatctctactaaaaatacaaaagttagcagggcatggtggtgcacacctgtagtgccggctactcaggaggctgaggcagaagaattgcttgaacccaggaggcagaggttgcaatgagccgagatcacgccattgcactccagcctggtgacagaacgagactctgtctcaaacaaacaaaaaacaaacaaacagttatttcccattattaacttggtggcctctggcacgagcaaagccaccaatgcaacttcttggaggaaggctggccatcctttaaccaccaagtcaagttccttgcttaggtaacccactggctgttgagctggacctcgagcctttgttaaaattccctgggccgtttcctttctttctgatacatagagattaaatgtgttccctatgagaagactgagggctggtgttttaagtaatgcttgttttaactggttaaggcttttgagttttaagattccaagtattagttgcttgagtttcttttatgaggtggtataaagggtgaggtatttcaccatatccaggtacccacagtctgcaaaattcagtaattcctaagaatccccttaactgttaaaggaaatgggcttaatcctttccttacctggtgctcttgtcccttctgataagactagacctaggtactttactgaagtctgacagagctgagctttagattttgaagtcgtatatcccctttctgccaagaaattgaagagagcctcagtgctttcctgttacttccttggttggagcacagaggagactgtcatttatatacttcaaagtttaaacttgagggtgagaaaaattagaaaaacatttggacagggtctgtttcagcaacttccttctgatatcggggggtgcctgagtaataaacctgctctttattgaattgggagacagggaggtgtgtttcactaaggcctctctcagcctttccataacggctgagggattttcatctgatttttgatttaacatggattgtttagagtaattaagaggtttggttttgttttttgctagccttttaatatgcacatcagaaagtgtattccactcatctatgcgatgactagtctccacttagggttttcaaggggcactgtttatcttcctactgggaatgggaatcctgtctcttttttaccctctttccccttttgactgggtttcttttttgactggctataggatacatgctgtttgtcggtgaatctctctgctgccttagggctgcctgtttctcagcagcagttagagtttggcttaggagtaacataacatctccccatgcaagatcaaacatttgggttagattttagaaagcttttatgtatctatcagggtcatccaaaaacttgcctaagaccccctttgtttgtctaaggtactgcaatgatatgggaacttgaactctagtggcaccatgtccattgggcatttcctgcagggtcaacagtgaagttgagttttcttgtgtggcacagctggaggagctgatgcttggctattggaggccccagataagggatggggaggtagagcatccagaagttgcatttgagggggttttctgactttgcggtgttgtccactgtgggcttgtctgatatgactcttaagagggcagagtcaattttgcagtgcttacaaagagctgggctgtttcacagggcaaagaaggcttgcacataggggacctcagaccgtttgccctcccacgtgcagaaaagatctagttattggatattattgaaattaacacttccctcagcagcccaggcctatccatcctggagctggtaagatggctatgtcctcgtacagaagaatataagccatttttcttcagtctcagggttaaaagtctcagtgtctcaggatgcactcaagaggagtgcagactgaagatggtttgttacctgttttaaaaagagtaggagaaaaggcgtcccttggtctttttcctttttttggtgtgacccagggtggagggaaagatcgaaagtgcatcccacttctctttcttcccatactctgggtcctggccaccatcataggtgtcacccatggatgcaagcatgaccttcacccgtggatctggaagagctagttgggtgtaatagtcatgcttacctgtatgaggacctgactctccacgctgctggtttcctagtcccaagtggcccataaggctcccagggtaccctagtggtctgggagatattgtatttgggtgagaccctttaatggagggagtgttttaatactatctctggcttcccttgctatggccctagcaaaacattgaaatcccagagaatgggaccgattgacttccaaatatgaaatcttctttttatttaaatgccagtgtagttcaatgcagaacaggtgactcaaaagaacataaggattgagtggctgttctcccgactgttaaaggtacagctttgctgttaacagatggagcatggagcttagtccctaacagaggcacacaggagggagaggaattggggaactaatggttttgcacaaagggcagatagggctccttatggagaaaaaatcctatttcacttggtggcgctgtaggatctgaaatgttaaataagaactctgactccaaattctttccaggaagaagttagaaagagaggtttgggcttaataggctgtccccattgtatgccttccagaagaagaaaattaacttgtctcataatggaactgtctagattcattgggcagtcctgagcttttacatggaggaaaaacacaacccaaatggagagggagaagggtattcactcagcatgaaatatcccctctatacagtgccatgaatgtctgtcattagggacaaaaagctctcactaggtgaaagtttagacagaaatcctctaattgttctaattagatcaaacctctatagtaaacagttcaaaaattatagtgtcagggaatcatcttcatggttgctggacttgtcatcaacatccccaggatctagagttccatcttctggcctatctggaaaacctcacagacatctacccagtacttctaactaaccatagcaatcccaaagtaccaaaacccctacttattcagtggaactctccttcacttaatggattccacctgaatgtccccttccacacttgccattatacctggacttgaaaagttgagtatatctccagtgcattaatgattcttttgcactcactactatgttaatgacacaaaagcagacgtttccctgtgatgctctgatctaactatagttaccaagtttccaaggcaacagcaaggtaaatggtatttcacttgtaggcaagaagaccatatatgatgtcttctcccagaccagaacacacgggaaaaaatgactgcctaatctgggagggtgggagtactattcgcttctggaaaacaaggtttgtttgaccacccccattggaacaggggaagaatatctctatagacccaacttggcagcaaaggatagacattacaccctgtaggacctctatgctccaactggactcatttttgtttgtggccatgaatgagaagtcacatgctgtaactactcctggctccccagggagccatctgttcttttaggagtagctttcccttatatatcaaaaacttggaacaaagataaatgtatgttgaccacccttgcccctccaagggtcacagtctataacccaataaggcccaggaacaccagaagtcaacaagcaataggattaattctggtgggaatcagggcagccataggacaagcagcaccctagggtggctttgcctaccacaagtcaaccctaaagaacttgactcaaactctagaatccttagccaccaacacaggttaggcactaccagcaattcaagaatctctagactctttggcaaatgcagttctcaataacacactggcattagattatctactagcggaacaaggtaaagtctgtgcagttaataaaacctgctgcacatatattagcaactctggataggttaacattcaaaagatctataagcaagtgaccctgttatgtatattttctttggctcttgcttgtttaacctcttagtaaagtttgtgttttctagatcaatagtccccaacctttttggcatcagggaccagtttcatggaagacaatttttctatggatggggtatgtggggctggggctgggggctggtctcaggatgaaactcttccacctcagatcatcaggtactagattttcataaggagtgtgcaaccccagtcccttgcatgcacagtttatgataaggttagcacccctatgagaatctaatgctgccactgatctggcaggaggtggagctcaggcagtaatgctcactcacctgccactcacctcctactgtgcagcccagttcctaacaggacatggaccagtatccacaggagaggggttggggtatcctgttctagttccaggtaaagacaatgctggcacaaggcttccaacccatccttgtctactattccagagaatggaagtgtccttcctttggggaccttatatgtggtatccagggatgtttactcctttagtgctaggcagggcctaggcccacaaaatcagcagcaagcagtcacagagcccccttaagattaaagaggagtatctaatctctgatgggagagtgagataggaggcaggactccataccagactgaagactggctgaaacagggaacaggcaccaagagcatatctacataatacacacccaccagtgccatggcagtttaccatcaccatgacaacacccggaaattaccatcccttttctagaaatttccaaataacccaccctttgcatgtagttaaaagcgggtataaatatgattgcagagctgccccctgagctgatactcgacacactgcctatggggttgccctgctctgtaggagcagccacagagttgtaaccctgctgcctcaacaaagctattttccatctaccactagcttgctcttgaattctttcctgagtgaagccaagaaccttcttggactaagccccaattttggggctcacctgccctacaacgccacctgatgtcctacctctgtgctttctaaaaccatctcccttaccactggaagaatataacttaggcctcaggaaatgaggataattcatgctgacataaggagctctttaaaaaataaaaaagcagctgggcgcagtggctcatgcgtgtaatcccagcactttgggaggccgaggcagctggatcacctgaggtcaggagtttgagacaagcctggccaacgtggtgaaacctcatctctactaaaaatacaaaaattagccgggtgtggtggcacacgcctataatcccagctactcaggagactgaggcaggagaatcgtttgaacctgggaggtggagtttgtagtgagccaagatcatgccactgcactccagcctgggcgagagtgagactccatcaaaaaaaaaaagaggcagcattatataataagatacctgggggatattgatggacatgctaccttggagtcctgcctagctcagccccttcttcgagaataatccactacccacagtcctgttaaccaatctctggggatacctgacccaaccaggctagatcaagttttcttgcctgaattctggaataaggacctcagacagagggcagagtgtgctgggcactagggtgaggatttgtgtttaaagggctgtttctaccccagtgatccccagtgcagacacagggagaccaggcaaaagcatgtgagaccaaaacagagaatacaacaggacctgtgggtagagggagaagggcttgagatgcctttctcaccaggcagtatgtgcaagaggatggaatcagaggactagggtcacccacatgggacagaaataaagctttacccagcaagaccaagagcccacagttctgcagcctcacatcttggtgcagtgtcctctgggccaggcccaaatatccacatttctaccagatgaaggtcagggccatgaccttgaaaggcaccaatgcctggcaagtcaaacagaaagttgacctcagactgttagatattagaacctattgcttggtcactgggaaaggcacagagaaccaggacatctgagggttgagctccatgtagggcacaagggtgagggacactgcctctgaaaatagggtaactgtggcagaggataaagcctatgatgggggatgtcatttccaagttaaggtttctgctacccaggctccttctgattctctacctcccacatgtcctcctgcactcacattaaatcatcccaagtaatcctccaggttgcttgcctggctccatgctctgacaatcatgctgcagaatggagctgttccctctaagccaggctatgcctacactgtcacaccttgtacaaggagattgtgtgtgttgtaaaaatagacacagccagttactagatgtgtagatgcacttttaccacaggcacatttgttttgctattacctcctccactttctattaatcatacccaaaatttctgtaccaattatgtcccatgcttagctcccatcagcttgagtaccaccatctatggaatcatgggcatcagggcacataggttcctttgcagaagctgggaaaaagcttcgtctcaacagtgctgggcattacagcctgtagaacaatgcaataaatccatcttattccctaaagcacaggagcctgtcataacagccgacttgtcctcaggatgacctctggtccagagaaagtgtagggatccaggccataaattaggacaacaaaattcttgcattgtttcctaggaggccttgagcagcaaggcaaagtggactaaaaccagaacaagaactactgtcattttacttttcctgcacaggccagcaacattggggccccacaaaagctgtccatgcctttatgtaggagcccaaatgtgttttccagccacctcacacagtaaaccaaaccctaagaccacacatagatttaaaaataaggcctttattaccacacaaaccagagcaatgtgaggcagccagttactaggtggtgacttggaggctggaaaaactaccaagtgttgtgtgaaaacaagaatttccatgaagggaagccttccacatcagcttccagcagaacccaggctgggcccttctggccaaaactggtcagatgtatgctgtaatcagtcagaaaagggaaggaattccccttaaaggctcagactgctcaaggaatttcctccaagggttgggagaacacaggtgtatctgcctcgccttagtatgcaagggtgactaatgatttaactctggcaaaggcctccagcagtttagaacatgcaaaggagctcctgcaagacacatatgcctggaactaatgggagtctgacccatcgggaggtctagaagtatgaggtttaactttaggcagacggctccttcacaaaggctctctatagccataacactgaagaaagacatggcacattccctgcaggtctaaggcttttctcaggtttggagtttcaagagttaaacaatgttagatcttgggctgtagggttttccacatttgctgctgtcacgaggcctctccacagtgtgagattttcggtggagaatgaggccagagtgttgtgtaaaggacttcccacatttgccacactcatatggcctttctcctgtgtgaaccacttggtgttgaatgaggctagacttttggataaaggatttcccgcactgtccacagtcgtaaggccttaatccagtgtgaattttctggtgttcaacgagggtatagctttgtctaaaaaatttcccacattcactgcactcaaaaggcctttctccagtgtgagttctctggtgcctaacaagtttagatttgaacataaaagctttcccacattccccacatacataaggcctttctgcagtgtgaactttgtggtgtttattgagggtggttctttggctaaaggattttccgcactcatcacactcaaagggcctagctccactgtgaattaactggtgctgaatgaggccacactttaggctaaatgatttcccacactggccacactcataaggccttgctgtagtgtgaattctctggtgtacaacaaggctgaagctttgtctgaataatttcccacattcaccacactcatatggcttttctcctgtgtgagttctctggtgtcgaacaagagtggatttggacccaaaggcttttccacattcatcacactcataaggcctttctccagtgtgaattctgcaatgttcaataaggttggaactttggctaaaagatttcccacattcaccacactcgtaaggcctttctccagtgtgaactctgtgatgtttaatgagggtggctctttggctaaatgatttcccacactgaccacacacataaggcctttctccagtgtggattctccgatgatcattcagatgagaggtttggctaaaagatttcccacattcactgcactcataaggcctttctccagggtggactctttgcagctgaacaagggagcactcacagcagcaggctttcccacatttgctagattcataaagcctttttccagtgcagactctagggtgaaaaaaagtgtgtttgtggctggactctctcctgcattgactccacttgtaatgacttattccaacatgaaaggcctcctcacatttgctgattttgtttggcttctcatagttagcaatagcttgcggctgaagaatgcccaatggggctaggaagtccttcccaacctcactgctggtgaaaggcattcctgactcatggaacaggcagcactgcacaaatgaggccttgtccatgtcactttccaagggtttctctgcactatgatgcttctggtcctggtgaaagaccgcacatgccccagtcaagtatagttcctgcccaggcaaatcggtcaggtgcaaaatgtcggtcaggaatgggacacacatgtcacaggattgaatcttctgggtggatggactggcctctggagtcctgacctgaggtactccttctacagaaacactttgctcaggtgtctcttcatcctccatcccatgccaacaaactgaaagcagagaaacactgatgaaatgcacgttgactatgatgggagtgtattagtcatttaaaaaactattttctgaataattggtgttctgacatcttaaaaactttgctggcctgagctcaggagtttgagaccagtctgggcaatatggtgaaaccctggctctactaaaaatacaaaaaattatccaggcgtggtggtgggtgctactcaagaggctgaggcacaagaattgcttgaatccgggaggcagaggttgcagtgagcccagatcgcaccactgcactccagcctgggagacaaagcgaaactgtctcaaaaacaaaacaaaacaaaacaaaataaaaaacattgctggctggggagagaatggtgcttccagagtgagccaactcttaaagagatagcaaagggctcagcaaggagcataacaaatacaccatcaatccagagcccatactcccaatcacattttctatgtgacttggatgcttcaggagctaatattcctctgctctagtcatcccaaggtcaggcaggagacaactacgcctagtgagcccctttgccccaaagcaaactactcaaattacccaatcctaaactgtttattatgtcttgtgttacctgcagaaaccccaataaaggctgtggcttaatattttccctcctctcttgcttctaccttctgaccactgagcacttcctcatgtggccctgcatggcatggtgttcacatgctcttgctactgcaggtgataaattcctatgtcactgacattaacctctctgtattggcactctactacctccattaattaaaatcctgtgggtacataacaggaaatgggaagcaccttcacatatacatcaaggaatgaattcacagtattgctttgaagcaatattgaggaactgaaagcaggataagaaagaggctgcttggcagtagtgggcctctaaagatcacaaaatggggaggcctcaccaaacacaggacgtaagaatggggtacagtacacaaggagaggcagggtctccaatctattcttttgccaaatcctgtggcaagatcttgtcagctggtggcacgtgtatgctgtgctgaaagctggcattattcgggcccaagataatgcaattggaagtgagtgggagattccaattgcgatcttgtgttcaagaaatatttaattggcatgtgcacaactcacaacatatcgtgagtgggtcagtgttggaaaacatgctggggggcagtgcagagaaactggtgacacatggagggcaggaagatgggggcagcacgaggccggatgtcccagatgaagcaataagccagcaaagtgtcaaggaagaggaagaaaacatagaaatgagatgtgtccagtggcattagcaccaaactctggatgacacagggcaaattcctggtaagattagaaaacaggctggatgccatgtcctcacccaggtgccactgactgaggccaggcttcctctgaagccatattcccatcttcaccctttccaacaaccagggctttcccaccacctctagatgtgccactacttgggacctgaatgaagcaagtcctaagggaaagctgggacaggtgagtatcctgcagtggcccagagcaagtcagcagccttgagaacacaagaaagaaaattaatatcacacagatccttgaaggaggttctggcaaccacagctcatggtccatgtaaatactgatgaggaaaattctgcaaattcctaacacaggtagtcaaaggaaatgtcatctaggaggcagaatttgagacacaaagtaccatgaatatggacacagccacccaaagaggaagtgaagaagtaaacggagatgcattaggctgactcaagacacctaacagccagacccatccctgtgcattttgggacagcaaatgtcagggctgattaaggagtgcaatgatttcattccttacaccacagcacatacgccaagacagtggggaagtcagcaaagcccacggtccggcagagctgcctctgaggaaaaagaggatagacgaagaccaggacacgagagtgggtgtgagggccttacccagcgcagttataagtgcaaagttctccagcatcacatcgcggtacaggagcctctgagcctcatcaaggagcccccattcttcctgggagaagtaaatggccacgtcctcaaaggtcacacagccctgccatgatggggatagatctttccatgatcagattctctcctaggaccccaagttcatgccccccacacatcctttccctgcttatccccatacctaagccccacctcagaggagataccaagacctggtggcactgattcctgccctctcctcatggtcccatcatcactgtgtcttcccacagcaccaacaggcaggtgggccaggaaatgccattttaaactctgggtctagcatatagggctggattttgtcttgtcagacagttctcctggggtttccaaaattatgccactcacatacaaacaatgatgaggtttgccatcattcttatatcctcaatgccatggccatgggttgttcagttcacacttcctctccatatgcacatcactctttgaagcacacactctctcaaacaatctcactcccacggctatttccaccctgttgccccacaccataggcatctctctggcatccccacgatagttggaatgcaacattcagaaagtgcttggcaaactgaaatgaggtccggtgccactcaggctgaatggtccccactgccaaaggcagcccttcagagaccctgctctgaaggcctccctgcctgactctgtccctttctacatcctcagtcacccagaaatacctggggatctgacaccgatggccctcttgcactagcgctgcacttgatgtcctctcttaagtcacagccttcctctcctgctaaccctcattcaaagtctgccccaggggacccccacacctcaggcccaataactcccagatgaccacctgtgcccctcaacttatccacctccctgaaattcctgacacctcaagggttgccacaaaaccctggtagatatatccagagtgctgagtaagcactagttctggtctcagtgtcatcttgtctcaattacttccaagcattgatctcatgcccactcttctcctagatccttggccacttgccagatcatccttgctctcacaccctaccatagccacctctctcccatacctgtctttgtgattcccaccatgaccaaccatgtccccaagcaggagagccagtagtgacccccaaccttccttccctgggctggtaatagcattaccaaagtgatcacgattccacctcctaattgtgtcccaagctatacccctaggcaagtagtggccaccaccttttaaatgtctctatcctgaatccctcaacacagttctagtcctgtaggataaactatccacttcatgtctaaactaactgttctttgaaacatctcagactctaaaagatgtcccattgggccatgttcagatgatttttattaaaaaattttaaaaataaagatggtccatatcaaaatttctgattatctctagagataactgactctactaccaactttacaatcctcgctagtggagcttccatatttccagctgctaaacccaaacaccttgcttttacccctaaatcctacttttctatctcaaaatccaggcttccctacttaaaaaaactgatctaaaatccaactaccacctccacagccaccacacaagtccagccaccagtaacactcacctggactactgcagcagccttcttcactatcttcctatctcatacctcacactcagcctgttctctcagcttggccacacacagggaacctgatgagacctggatcagatcacatacctcctctgcccccaaactgtcattgctcatcacacactccagaagaaacacccgacaactgacagccattttttgtctgattcctgcatcccagctttcagttcccatgagaaagaaaacagctgtagtttcctaaaccagctcagcctgaccttcaagcacttgctcatctggtatctaagcctgagacaacgttccacaccttactttactggttcccagcaataggaaccattctataccagcttccagcctggatgtatgaccctgggactgatgtttgttcaggattcctagaaccaaggacccaaagagtgccaagagaagagtcccagaacacaatctcagagacaaacactggggtcagcatcagtgagggcccgaaacactctccactcacctgtgtaaagcccataagtttagcttctgcagtcacgggaacctgcgggaagaggaaggctatgagaggcaggtaactatggtggaagctccatgggctgatgcctccttgtttccctgcgcagccctggagccaggtgacttggtgatgactaaattattattgctcctcagttccgtgtgactcttacctgctgtgggaccttgcacaaggactcaacttccctgtgcctcggtgttatcccccttccaggctgttccaactctgagtaactttagaaaaaatttgaaaagtctaactcagaccatgtgcctcgtctgttcacaaccacccatggctctcagcgtcttgaaaagaaagagcctcattttaccattcgggcgtgaacgttactggctcaatcgtcccagcaagattcacagaaaccggcccctccgcctgccacaccctccacagcccacgacaccaggcttgtaaatgggagccccacccgcgagggcctcatagtcctggactctagggtcgggctgcagggacgcaagcaggcgcccctcatgcagggtgttggatttccggcggagagggcaggtgaggcccgggagacgcagcactcaccgaagtcgaatccctaagcacggccgccgccatcggattgtgagcggagcggggccgggagcggcgggcgacccggggcgggaacccaggcacggctgccaccagcgccagcgacccaccggctgatgcgcagcggggcgacccccgctctgtgccggaggcagcgtttctaactcaggcggcgtgggccgaggtagagaaccaccaaaattaccatctcggagcggtgccggaagtcccgccttaccgtatgcaacaaacggagacaggtccgttcctgaacgttgattggctccgcgtctttgcagcttggcgctcggcattatgggtaatgtagttctcagaagcccagggttccggtgccctccctgagattcacccggaacaagggctaagcggcccgcggagggcgctaggaaaaggcgcgacaccaagagcgagacagggacttgctgctccttaaaggggccgctggccgatttccgcagtcccatacccactgaagggagtgtctgggttaagataagaggttgtagagaccaaggttcttattaagcagatgaagctttcacgcagcaggcttcagagggaatagattgtaaatgtttcctatcagactttgaaaggtgccagactcttaattctttcctggaccatgaaaataaaaaaaccctggagaggaaaggggattctcagcaaaatgcagattccacaagacacacctttgcagggcctcttcaaaatatgtcaaataaataaagtttagagtaaaatacttcaattcctttcagggcctgctatctgtcatgtaatgctatactacaatcaggctggaattcactgtcttattgctacaagaagtcttaaaatctctgttttaatgttaatgctggtcagttgtgcctgaattccaaggggaggagggcaagtctgaccctcacttcccatcacgtcctgaactagtttttcagattaactttggaatgcccttggccaagaggaaggatgcattcagatggttggggggctgggaattttatttttggtttacacttctcatgcctcttggaatctctgaaccacatacaacggccatttgttgagtaaaagcttccaatgcaggaaactgtctctttcagcctcatgctatacaccattaaaacagtaattactggcaataagactgggctttcttaaacatacaggatctcacagaccataagcctatgatccttcataccagctgcccataatacttttggttttggaagcagcaccccataacctcagcatggctaccaaggcctccttaagacagggtagaatgaataagatctagtatttgatagcacagtagagagactacagtcaacagtaatttattgtacattaaaaacaactaaaagagtattataactagaatgtttgtaacacaaagaaatgataaatgcttgtgtaccctgatatgattattacacattgtatgcctgtatcacaatatctcacgtatcccataaatatacatacatactatgtactcataaaactaaaaattttaaaagacagataaatggcaagcaggtagatgaaaacatgcttaacatcattgatcactataaaaatgcaaatcaaaactacaatgagatatcatctcactctagttaaaatgacttttatgcaaaagacagggaataatgaatgctggccaggacagagaggaaagggaaacttcatacgctgttggtgggagtgtaaattagtaaagccactatggggaacagtttggaggttccccacagaagtaaaaatagaattaccatatgatacagtttacaccacccagaaaagaaatcagtatatctaatagagatctgcactcccatgtttattgcatcactattcacaacagccaagatttggaagctacctaactgtccatagataaatggataaagaaaatgtgatgcatatacacaatggagtagtatttagccataaaaaaagaatgagatcccatcaattgcaagaagacgggtgaaattggaggaaattatgttaagtaaaataagccaggcacagaaagacaaacttcacatgttctcacttatttgtgggagctaaaaatttaaacaattgaactcccggagattaagcttagaaggatggctaccagaggctgagaaggatagcagaaatggaagggaaagtggggatagttaatgggtgcaaaaatatagtcagatagaaggaataagacatagtatttgatagcacaacaaggtgactacagtcaacaacaatctattgtagaattaaacataactcaccgggcatggtggctcacgcctgtaatcccagcactttgggaggccgaggcgggcagatcacaaggtcaggagatcgagaccatcctgactaacacggtgaaaccccatctctaaaatcaaatctctataataaatctctaaaaatacaaaaaattagccgggcgtggtggtggtcacctgtagtcccagctactaaggaggctgaggcaggagaatggcgttaacccgggaggcgttgcttgcagagagctgagatcgcgccactgcactccagcctgggcaacagagcaagacttcgtctcaaaaaaaaaaaaaaaaaaaaagaattaaacgtgactaagagtataactggaatgcttataacacaaagaaatgataaatgcttgaggtgatgaataccatttatcccaatgtgattattacacactgtgtgcctgtatcaaactacaccatataactcataaatatatacacctactatgtacccctaaagactaaagataagaaatcaaaaaaataaagacaggatggagctaaacctgggccctctggaatgttctacctgcagatggagctggcctccactatcttcagtcccttgctagatgtcatggtccttgaggtcaacactccccacacctgcggaatcccttgggattaactgggtgaacagtaatcgaagttagtggactatatgaatgacgctgccaagctatacttgaatagctgtgccaaatagacaaacacagaaagaaaacacaaaacaacccatccacatcctaagggcttcacactttcttgcactctatcttcaatgttttttcagctttctctttaggtacttattgactgttggtctcacataagtttagccatagatggaatttattactgctttgtgaccactggcagcctccctcatctctggctgggcttctccctgaaggactgggcctcaggagtaggtgggtcatttgtcccctgggcatgccacacagagcaggttttccgaactaggctatccctcctccccaagttatccaggcaattccgctagttctatgcctagatggacacacatgcttgaagtttggggagccatgtttgatgtgatgtggcaactctgaaaggacagtgagggtgagggcaggtgttaggtggccattgtgggggctgctggcctctgggaccagagggtaatgaggtgcacaaccgtgtcacctagagggtgccagtgttaataaggaaaagggttgctgtccgacgcacacagaagccaatgccatggcaccaggtttttgagaaaagcaaacctttattgcaagtcgacaaacaagaagacaggagtccagctcaaatctgtctccccaatatggggtttggggcagcttttaaggattaggaaggacaggttggtaagcactggaagggtggattttgattggaaggacttcaaacaaatctattgatggcaaggcggggatggggttgttatcacccaacattcagagacaacagaccccttgctttcggaagtgtttcagcacttgggttccagccatagcctgatattttggtttcctgtggtgacagggtggagtctggtaggtgagacttcagctccgagtgttgggtcaatgttttcttttctcttttctttttatttatttatttatttacttatttatttattgagacagggtctggctccgttgcccaggctggagtgcagtggcataatcataactcactgtaaccgtgatctcctgggctcaagcgatactcccacctcagcatcctgagtagctaggattacaggtgcaccaccatactcgggtaattttttagtttttgtagagacggggtctggctatgttgcccaagtggtccttccacctcagcctcccaatgtgcttggattacaggtgtgagccaccgcgctgggcctgacattttcttttctgcacattctctagctgtgtaacttgcaactctttagctctgtgcctgcaaaataactggacattatgttaccaacagaggatggccagatgagactggtccagtggttaaacctgcaccttcatggaggccattatgagtatccctacaggccgagtctcagggtgcccccagaagcccataccagccgctgtaaggcagagcatggacttcccctcggggactaaatcccattcttgggctccagaggccttgttcctaccactgtacgccaccgcttggggtgccctgggaacccgcctacctccctactgccctgagggcggttggagatggtcccagcaggtgtgggagatgaggtaggagacgtcttcaacggggtccaaggctcatctggacccagttctcagccgaggggcggtggagagggcgtcagaaaacgcaggaacggctcctagacccaggaggggactcagggaagcagaggcgctttcctcggcggctctggggccttcccagctcgcccggcccccctggaggagacgtcccccggggtggagctacggagaaccccttcccatgggacgtctcggccccgcctcccgcctctgggtacagtcaaagggctcaggtcagagcaggagcagccgggggcgcggcccccacgtggcctcccgggacacgtgcccacagcgcgacacctaagtcgctcctttcacagaatagccttggccccggcacggcctcgaacgccttgaccccgcaagggaggggcacgaggctcctttgctcccgcaggagcgtcgaatacgtatggaatacgcgtcggtgtggatctggcctcagcttcctgagcctgaatcaatgcttctaatcacgtgggcgctcagccgcgacgggaccacagaaatcgaccagcggcctgtttaaggagcgacaaggcccagccctctcctgcattgtggcgacgccatttccctgcgcccccagcgcggccgcttggcttttgtttgaggtgacgctgggcggcagcatccttccctcagccctggggaccagcggggactacagaacccagaaggttttgtctccagccgcagggatgctgagccaatccgcgctgagaaaagggtcgtttccgctttgggaccaatgggtcggggagggacttccggtatcacttcagtggcggtcatttttgcagcgcttgggtgcatccagaccgtcagagctttgggagcgctttgtttggcgacagtcggaaggcgcgaggggaggggtcctcccgctgaacagtgggggttctaagggtcggcggcggcggggttgacggctttgcctaggtccctccgcccgtagctgtcgggtcccggccccgctctgcccacagactccgatggctgcggccgcgctgagggccccgactcaggtgagcgctgcctctactgggcctcaccctccatccccaaattagtgccttcttgggtcactacggtcgagatcctcatgtccagtacagtgggggctcgtgggtggggtccctatttccagaacttgggtgatggggcacggaagagggttacaggcaaagggaccagcgtttctaaactcttggagacacagtgaagaaggttcatacctggagtgccaaggtgaggagttttccctcaattcttaggatgctaggagccgtggagggttgtgtacagaagcggcatatggtctgagttaggtctttcgaagttttccaaaaacctcatggagttagactagaatagaatggaataacacagaggcacagggaggttgagttcttgtgcaaggtcccacagttgctaagagttggcactgaggactggaacgctgaggctcagaaataatgcaggcatcctcagtccacctggctctggcctggacaggaatccagggaagcctgaatccgtagagccctgtatggtcacctgcctttcatgatctttggctttccacaggttactgtgtctccagaaacacatatggacctcacaaaggtgagtggagggtgtcccaggccctcactggtcctggccccatcctggggttttttcatggatctttttgccaccatccagttctttgacctaaggactcttcacaaactggaagcttgacatcctgattctagactggtggttatttgtagacgttcttattgctggcagacaatggaatgaggtgtgaaaggttgccccgcctacgtacaataatgtgtaaggttggcagtgaagctgagctgattcagggaaacacaactctcctttctttctcatgggaactcagagcagcagggcaggactcaggcctggaatggctctgagaaattgggtgttttttctggaggtgatgagaacaatgggaggtttagagaagagaacggaggttatctgacactggtctcatcaggttcactgttaatgcagcatagagaatactctgtgggtgtgatggaggcgatagaaagaccagggaggaggctactgcagtggccaaggtgagttttgatagtggcttcaccagtgtggtggctgtgaaggtagaagaagtggctggattctgggtcagaattttaattaggcctgcttgcattttcagattttgagggtaagagatactggtcaagcattactccaggcattttgaatttagcatctggaaggatggaatctccatcaaatagcatgttataggattgattttatttttattttatttatttatttgtctatttttagacagtctcactctgtcactcaggctggagtgcagtggctcgatcttggctctttgcaacctccacctcccgggttcaagcaatcctcctgcctcagcctcctgagtagttgggactacaggcacatgctaccgtgctaccatgcccagcgaatttttttttttttttttttttgtatctttagtagagacagggtttcaccatgttggccaggctggtctcaaactcctgacctcaggtgatccacctgtcttggcctcccaaagtgctgggattacaggcgtgagccaccatgcccagccaattaattttcattaaggataacaggagttttgtctttagctattatcatagtctgagatattccaaagaatgatatatggagacatcaggtgagtagctgtccatgtacatctagaattctggaagtggtttaagatggagaaatccaaaaggtggtggccagtgtttggcccagagtagctatgggtcacaattaggagtgggtaatcctggtcttgaagataatgctatttataatgcaggaaagggctgggtgtggtggctcacacctgtaatcccagcactttgggcggccgaggcaggcggatcacttgaggtcaggagttctagaccagcttggccaacatggtgaaactccgtctccactaaaaatacaaaaattagccaggcgtggtggcaggcacctgtaatcccagctactagggaggctgaggcaggagaattgcttgagcccaggaggcggaggttgcagtgagccaagatcacgccactgcactccagcctgggtgacagagtgagactccatctcaaaaacaaaacaaaaaaacagaaaagggaaggttggggctatgactgtgtctcatgcttggacacgtggtagaggtggtgagcatcacaaacagttgtgagagaaaagtggtcatgggaagattgtaggaaagaggatgatctggtgtatcagtccattttcacactgctgataaagacagcaagtctctaggaagttccagactttcccatattttcctgtcttcttctgagccctccaaactgttccaacctctgcctgttccccaattccaaaattgcttccacattttcagttatctttacagcacagccccactttactcatactgatttactgtattagtccattttcatgctgctgataaagatgtgctggagactagataatttgtaaggaaaaagaggtttaatggactcatgattccgcgtggctggggaggcctcacaatcatggtggagggtgaaaggcatgtcttgcatggcagcagacaagagagaacttgttcaggggaactccccccttataaaaccatcaaatcttgtgagacttatttactatcatgagaacagcatgggaaaggcctgcccctatggttcgattacctctcaccaggtccctcccatgacatgggaattgtgggaactacaattcaagaagagatttgggtggggacgcagccaaatcatatcatctgataagtggtcaaggcttccaaggcattagggacataagacagacatggagataaagaaataattggtagaagatgacactgaggccaggtacagtggactgtgtccccgcaaaattcatatgcttaaagcctaattccagtgtgatggtatttggaggttgggcctttgggagataattaggtcatgagggtggagccctaatgaatgggattagtgagtgctcttaaacaaagaggccagagagctactatctagtgctctttccaacaagtgaggatacaagaagtcagcagtctgcaacctggaaagagtccctaccagaacctgaccatgctggcactctgatctcaggcttcctgcctgcagatctgtgagaaataaatttctgttgttgataagccacccagtttgtggtattatgctagcaggccaaactgactaaaacactaggactagtgcttattcaccatggtaaaaactcgccaggaatttgttgtgacccttggtgagtctggggagggtgtgagtcaagcagttgaataagtttaggagtacaagtgttcatctgtatgagtcattaggttggaggtagagagccactgagagtctgtgccactgaggccactgattttgaatgagggttaagaggtgagaagaaggttgttgattgaagaggggacatcaagtgcagcacaagtggaggacggccatcggtgtctgacatcaggtgattcttggtggctgaggttgaagcaaggaacagagtcaggaagatagcccttcagagcagggtgggggctgtctatgacagtaggaaccatcagaggtctgtgtagcactggatgatgtctcaatttggcaggcagaggggtggaggtagccgtgggagtgagactgagcgagtatggttcaaagaatgatgtgtacatggagagggagtgtgaactgaaggacccaggcccctggcattgaggacttaagggtcaaaggtgaagccacatttgattgtgtctaggaggcactatctgaaagacccttggggaactgcctgacaagaagggatacactcctacataccgggcccaaagtttagatgtggtgcatcctgcccacctcctggttggtgctgtagaaggatacagtgatcattgggaccatgaaaagagagtgggcatctgtgtcaccagggcctgtatttccttaaggtggggatgattgcgtgggtggatgaacttgtggaggcgttgattgtggagtgacctgtccccatcatgacagggctgtgtgacctttgaggacatcgccatttacttctcacaggacgagtggggacttcttgatgaggctcagagactcctgtaccttgaagtgatgctggagaactttgcccttgtagcctcactgggtaaggccctaataccaactccagtgtcctggtctgtctatggtcttttgctgacttctccactttcttgggatatgtgctatgggatccagcactgtgcactgcctgagtagccctaacacctgctgcccagtggtctgggaacacctgctgcccagtggtctgggaacacctgccactgggcagcaggtgttcttcagtcagccaaatggatctctgttccttgctctcttcttggctgggtgtctgtgttcagatccatgacaccttgtgtcccaagttccctgcacccccatctgctagctgacattttcttgtggctacctgtgtcatgattgtagtcattgtcattgtctatacttatggggacaatgggctcttcttactcactccttctagtttgtttgtttgtttgtttgtttaatgatattaactttcttgcccatgggctgttgtgtgctgagtcgttctgcatcagtgctgatcactcacatgttctgtctttctggtaggacttggcttcatgaaggtcccacatagctagacaactgagggtgtgcagagaaacctggttgctttatagggtgaacatggtctcagagaaggcctgggcttgttgagtggcaactggttgggggcatgatatccgggctgttttccgatcacataaggagcctgtcctgtcttcaccactgtttgggtgcacatgccactggccaaatctcatttctatattttcttctcagtacttgacacttctctctcttattatttttatctatgacttctagcacctggctacctccacctttctgatcttcatgcatcatctgcttctctgcactgctccctctgcaatgttttccaacattgacacacacataatgtctcatgaagtatgtatatatgaccacatgaagatatgtgatcatatcacttgctactcagtttcaattgtattttcctgggcttgggcacagtcaaccttctgcacagcatgcaggtgtcaccagcagacaaggtcctcctgaagactatgtggtgagttttaggaattggaaggctactcaaggataatttttgaggctgttggtagaggaatggtttgaaggcaatgccattccctgtccttcatcccatccttgtgtcctttatttggtgaggcctccctcattctgtgatctttagagatccagtattgcaaagcaaccccttcctcaacttgcccccagctccattatcctcaaaacaaacctggtgaatcattcgtttggtatgtgtgtaatggggcttcttgctctcagcatagtcaatgtatatttcatcagcggttctctgctttcaggttgtggccatggaacagaggatgaagagacaccttctgaccagaatgtttctgtaggagtgtcacagtcaaaggcaggttcatccacacagaagactcaatcctgtgagatgtgtgtcccagtcctgaaagatattttgcatctagctgatctccctgggcagaaaccatacttggttggagaatgtacaaaccatcaccagcaccagaagcatcacagtgcaaagaaatccttgaagagggacatggacagagcctcatatgtgaagtgctgcctattctgtatgtcattgaagccctttcgcaaatgggaggttggaaaggaccttccagccatgttgcggcttctgaggtccctggtctttcctggaggcaagaaacccggcacaattactgaatgtggggaggacattcgcagtcaaaaaagtcattacaagtcaggtgaatgtgggaaggcttccaggcacaaacacactcctgtttaccatccaagagtctacactggaaaaaagctttatgagtgtagcaaatgtgggaaagccttccgtggcaagtactcacttgttcagcaccagagagtccatactggagaaaggccttgggagtgcaatgaatgtggaaaattctttagccaaacctcccacctgaatgatcatcggagaatccacaccggagaaaggccttatgagtgcagcgaatgtggaaaattatttagacaaaactccagccttgttgaccaccagaaaatacacactggagcaaggccttatgagtgtagccagtgtgggaaatcctttagccaaaaagccacccttgttaaacaccaaagagttcacactggagaaaggccttataagtgtggtgaatgtgggaattcctttagtcaaagtgccattcttaatcaacaccgaagaattcacactggagcaaagccttatgagtgtggccagtgtgggaaatcctttagtcaaaaagctaccctcattaaacaccagagagttcacactggagaaaggccttataagtgtggtgactgtgggaaatcctttagtcaaagctccatccttattcaacaccggagaattcatactggagcaaggccttatgagtgtggccagtgtggaaagtcctttagccaaaagtctggtctcattcaacaccaagtggttcacactggagaaaggccttatgagtgcaacaaatgtgggaattcctttagccaatgctccagcctcatacatcaccaaaaatgtcataacacatagaggcctcatgaatgcagcaaatgtggaagcgccttcaactcaagatctatcatcatttagctcctgaaagtccacacttaagtagagccttagacctacagggaaagtgctgtctctgtagtattgtagcagtagagagcctttgtgagggagccatctgcctgaagttgaacctcattcttccttgtttctctggtagaaaccatctaccctctaccaccttgcacagtgggcactggtcactcctatgtgctaagacaaggcagacatctgtgtgttctcttaagtctttggaggaaatcttgagcagtctaagcctttagagaaaattcattcttttttctgactgatcacagcatacgtgtgacccagtttgggtcaggagggcccagccttggttctgctggacacttatgtgcaaggattcccttcatgtaaattcttggtctcacatgacacttggtcattcttccagcctccatgtcaccacgtggtgaatggctgcctcacattgctccagtttgtgcactaataaaagccttatatttgaatctacctgtagtcttggggttctgtttactgtgtggggtggctgggagacagacttcaactctatatgaaggaatggatggcttttgtgggcctctgcaggaaagtaagatgacagagtaattctaattctggttttggtcatacttgctttgctacctaaaatctcctaggaaaaaatgcaaggttttggttattctaatttgtggcctggatccctattctttctgtgagactagaggtcatcctgaggagaggccagctgttatgacaagcatgtgtgcttcagggaataggacaattttattccattgtttccagaggatgtcatatgatgcccagtgctgctgagaagcttttcatggggttctataaggaggcatgccctgatatcaaacattccataggccgatgtcacgcagaagacaacgcgagtcacatgtgaactgtaattggtacagaaatacctgggtatttctgtactgtgtgtactgtagcaaactagttggaatgtgcctcttataaaagtacatttacaaatcttcccgtgactgtggctttgagcagtcataggacctagaaatctgtgtatgtccaatagctgaggttattttcagcaaaaataattaaagggttttattttttaattcttgttggttttctaggttgttcacctcaagtgcattgctgtagaggcagaaaaaggaggataaagataacagaagtcctataggccagggatgtattgatagctcttgtgatttccaccagtgttgctgttgtctcaaattgccacagccttcattgcttgccaacatttcctgcatggagggactcatggttgcccttccccaggcctgaagagagagtgcagtcaacatgagattgctaggcattctggtttctgaaagttgggtgatcagatactttattgtgaaacatgttttacaaactttcttgatgtgtaagtgacatgccatagtttacatccatttatggtgtataatttgaagagtttgtcatacaagcctgtgaaaccataatcatgatcatgaacatattcatgattcacctcttgctgttttacaatctctgcgtgtactttccaggccttcaggagtcctgtcatttactttccctacaggagaatagtttgtgttttctaggattttatgtgaattgaaacgtaaaatacttactccatttttcctgatgatgcacaattttttttttttttttgagatggagtctcagtctgtcaccaggctggagtgcagtggcatgatcttggctcactccaacctcctcctgggttccagcgattctcctgcctcagcctcctgagaagctaggactacaggcatgcactaccacgcccaactaatttttgtatttttagtagagatgtggttttaccatgtttgccaggatggtcttgatctcttgacctcgtgatccgcccgcctcagcctcccgaagtgctgggattacaggcgtaagccaccacaccagctgatgcacaattacttttaagatttatcaatattgcttatgtgaatagttcatttgtattgctgagaaatagtctgtggatatgtcacaatttggataaacagttggatgctttccagttttgggctgttgcaaataatgctactatgaacataggcatataactcttaatatgcagaaatgctttatttctcctgtgtcagtagtacagtgtacgtgaatgcgtcacttttaaagacaaggccagactataacctaactgtaccatttgcattctcatcaacagtatgtgaaccttcttatttctctacattcttgccatacttggtatggttagtctttttaattttagttgttttaatagctgtataatagcatctgtctgtgattttattgcatttttctggtattttatggtattgaacatttgaacatcttgtatctagttgccacctgtatatcctctttggaagaatgtttattaatgtcttttgcttatttttaaatggatgttggtgatactttttcattaataaatagacgtataacaaagacttatgttgaaactttactcattcttcagtaatgtgatgcacttatttgctaaatgataaaattgttttcaaatactgggaaaataatttctcagttttttggtctattcacagtgtaacaactacagacactatatacctgaaacactaccttcattgacaaattctccatcactttcttaggtctaaccattcaatgaaacaaataagccctggtttttaatatttgccaatttccctggtaaaatactcccaccatggccaattacaaggtgtcaaaataatgtcactgaacatgaattgagaagaagtgggtagcgtcacaccactgtattctactttcaccatgccaatacagtagccgcagataacctgaagatcatgtatgtaggaaccatacagcctgtggtgtggcaagactgatgccatcttgaagtgaagctgtcatggtcacctatgttctgaagcagtagcatagatatcatcaaaatgcttctctcccccaatggtcatgagtcttggcaagaaagtctgaagacgtgaagagctgcacgttttaccctaaaaactccaggccgggcgtgttggctcttgcctgtaatcccaacactttgggaggccaaggtgggcagatcacgaggtcaggagatggagaccatcctggctaacatggtgaaaccccatctctactaaaaatagaaaaattagccggttgtggtggcttacgggtgcctgtaatcccagctacttgggaggctgaggcaggagaatcacttgaatccaggaggtggaggttgcagtgagccgagatcacgccattgcactccagcctggcaacagagcaagactccgtctagaaaaacaaacaaacaaaaaactccagccttgttgaccactacaaaaagggtcctataaaggatgtaaaggaaactgccttctggagggcagatacagggatccattgtctcacagctgcacaagacatcacttctgttcatgagtccctatgaaatgtttctgaaaacaatttggcctcttcctccttctttggcctttcagcttcgttggcctttgggatagattttcatacacctgctcactatagaacaatgtatatataagagtaaaacagtaaaatgattaagaattgacttttgagtatttattacttgtgtttttaaaagtggcttaagtgaaatctagttgtcttaaattctgcatatttaaagtatacaatttctattttaatatatactcgaaaccataagtttccacctgccctttttagtccatccctcttaacaagtaatgggtacaaaaacttatttttcctcttctaatggatattttcaagtatatacacaaatggaaaggactgtgttcagatgcactatgaaacctttctaaatcttccattattacttatcatttagtagccattcttgtttcaactcttttcacacataattattttacttacaattcccacatcttgtcattcaatgctgcacctcttcagaatgcattttcaagcataagagctctttcataattcctataactttatcaatcattatttaaggcatcataaaatatatcatcagtgctcagtcacctcgaattgtctccaaaattgatttttaagacaaattcattgcaatcagatccaaaatgaatctatatggctattagtagtttcatctggtgagtctataataatacacagctaccactttttattattattcttgaagttgatgagacatttgtccagaatttgccacattctggaatggtgcgtgtttttgttttgtgtctctctgatgtcatttaacatgctgaccctttctccatattcctgtgcactagatattaaggaaatgggtaactgaactctggtcctgcagataggtgtgcaatagtaacacacttatgcagtgtgactgtgttgtgtgtatgtgtatgtctattcaaaaggtgacattcacagacatctggaggcttagagattattgaaaaagtaaaaaaggaagaagcactttgtttttgcttcctctaagatacctgagaaggtttctcaactgatttgaaatgtgaaacaatgccaaaacaattaccatagatccagtaatactgcttcttggttttactgaaatgagttaaacatttatgtccacacaaaatcttgtacatgaatatttatagcacctttgttcataattggcaaaatttggtagcaaccaaaatgtccttcagtaagtgaacaggtaagtgtggtacatttagaaaatggtatatttatccacattaaaataaataataaaagatatggaagaacttaaatacatatttctaagtgaaaggatctgatatggtttggctgtgtccccactcaaatctcatcttgaattataagtaccacatgtcatgggaggaacccagtgggaggtgattgaattataggagtgggtttttcccacgctgttctcatgacagtaaattagtctcacgagatctgatggctttaaaatcgggagtttagctgcacaagcttattctctttgcctgctgccatccacctaggacgtgacttgctcctccttgccttctgcaataattgtgaggcttccccagccacgtggaattgtgagttctccattaaaccgctttcctttgtaaattgcccagtctcgggtatgtctttatcagcagcgcgaaaacggactattacaggatccaaactaaaaggactacatactgtgatttgaactatatgacattccagaaaaagcaaaactatggagacagtaaaaaatgagtggttgccaggggtttgggggaagggaggaagggatgaacaggtggagcacggaggacttttagggcagtgaaactactctgtgatactaccgtggtgtgtatacaagtcactatgcctttgtcaaaacccatataacaaccagctagagtaaatcctaatgtaaactatggatttgggatgataatgatatgccagcgtaccatcaattgtaacaaatatactattctagtggggaatatttatagtggagtggctgtacatgcatgggacaagggatatgtggaagctctataattttttgctcaattttcctatgaaccaaaactgctctaaaaaataatctattaaaactttaccagcctgagcaacatggcgagaccccgtgcctacaaaaaatcaaaaaattatcagggcatggtggtgcaggtgcatgtctgttaccagctattctggaggctgaggtgggagtattgcttgagcccaggaattcaaagctacagtgagctctgattgtgccactgcactccagcctggatgacagagtgagaccctgtctctaaaaaaattaaaattaactaatttgcaaattagtttaaaatatgtattttgcaatgtttgtgctgtgtatttgtataactcaagggagattaattttaacaaattgaatttggcaagccagttatttccatgagcagcctagttaatttatctacttaaacaacaaaaacaagtagatacacagattttctggcactttccaagctcactatttccctactttgactattggcctaagaaattgccataagagctgtgtgtacctgtagccccagctacttgggaggctgaggcggaaggatcacttgagaccaggagttttaaaccagcctgggcaacatagcaagaaccctgtctgtaaaaaaaaaatatatatatattttaaaaattagctgggcacagtagtgagtgcctgcaatcccatatactcaggaagctgacacagaaatgtcgctgaagccgaagagtttgaggctgcagtaatctatgatcctgccactgcactccagcctgggcaacagagcaagactcttcctcaaaaaaaaaaaattaccattagacactcaaatatgcaggcaaaatgagtcctttgtggagtcactcagaagggctccccacttacctttctatatgaaatcatgctggagccacaccttctccctttccttttcagacaggacttaaattcagcaactgaagagctatctgctctatgtgtcttcagggtaaacatttccagagccaagccaaatgtacttatagacttatatatgactgcactaaaaaaagcaaagtaagtctatgttcagttcaattaattatgttcaatattctttttttttttctctctactgagatggagtctcactctgtcaccaggcaggagtgcagtggtgtgatctcggctcactgcaacctccacctcctgggttcaagcgcttctcctgcctcagcctcccaagtagctgggactacaggcgcacgccaccacacccagctaatttttgtatttttagtagagacagggcttcaccatgttggccaggctggtcttgatctcttgacctcatgagccacctgccttggcctcctaaagtgctgggattacaggcatgagccaccgcgcttggcctagccacaagattattaatagttgtgacgtataatgttttgtgtcgacttgcctgcattaagggctacccaaatagttgggaaaaccttagtacaggatatgtctgtgagaatgtttatggaagatattagcagttgagtctgtagacaatgtaaaggagatctggcctcatcagtgttaggggccaacatccaatgctttgagagccaagatagaacaaaaaggcagagaaagagcaagttactctcttcttgccctggatcatccaccttctgttttccaacattaaagttcttggatcttgggcctttggactctggaacatacaagaatgaccctcacccagttctcaggccttcagcctccaactgggaatttcaccataggctcccttggttttcaggccttcagatgcagactgaatgataccacccaccttcgtgtcttaccaggttgcaaaaggtatatcctgggacttcttagcctccataactggatgagccaagtcccataataaatcccctcttgtacatctatgtatcctattggttctgtgtttctctggagaatcctgactaatacaataggtttcagtaattttcatttcacaactgtttttctaagatgatctcaactccccatgcaagcactgtccctgcagtaacagtatcaatgatcaaaatttcccatcaaagagatgaaagctaggtgtcccaaacctttattctggtattctgatgtcccctttgcacaagtgctctgactgtgaacactacagacactgttctactttaaaatggcatatgctaagtggctcttctgtttagaaagttgctacaatcctaaaagaagcatatctaagaatatggaggaagaaatattatatgaatacaacactgttccttacagggctagacacactcaccgattacacaggcaggagaggcattttctgtgagacaaaattcctctttcgtcctccagcttcggtgcgatctaacggatgttttatcattcctgtcatggcgctatgtaaactctatttcccttattccttactgagcataatgaaactcacaaagctgactctaacgttctactttacataaatgtgtggagaaagaaggtaatgtttactaggctctcgccaagggtagaggcattttgtatctgaataactctgactacctaggtgactagttgtacacaataccctccaaaaatctctgtatggtaccttaaaaaagcagcgaagctcctcccttgtccaaggaggctggagacaccacctctcagccttcccctccacctttctccatagcaacggggtcattcctccctgaggtccaggagaagggcgacctctgccagcccaagaagcggtgagaactacattacccagaggcccgtgagccaggttcttggcgtggagccaatgaggctcaggggagggacatttccgctctgtccaacttgtcggagcggaacttccggcgtcctccctgtggcgggcactttggcttgtgtcagttccatccgcgggtgccggatctggacctaggtgctgacagcgagaaggcgcgaggagagtcgttttctcagctgcacagccggggcctgacggtcgccggcggtggtgacagctttgctcttgtctccgcccggatcgtccaccgctcccggcccgctccgcccagagtccgatggcggcggcactgagggccccgacccaggtgagcgctgcgtcctcccggcctcctctgccctccccacccgaaactgagggacgcgtgaagggttttctgcagcccggaccgcactgtccggcacagtgaggcgctggtgctggatctcgtttctggtagtgtggcagggagcgggagagcgacacggtcagggggctgcgcgggcaacagcttggagctgcgcctgagccgggaggctggggagacccaggccggcctcacgcgtgcaggtagcagagggtggggcagcgccgcgctgcattggccccactgagtttcaccagcacactgagggccacagcgcgtaggacagaagaggggcacggccccagtcacgcttctaaaagtttcacaaaagctgttcagaggaacgcgctggaagggcagtgatgatagcaggcatggagggacctagtctttttacgaggtcacaaagctggtaaaagtcagcaccaaggactgacacccagatacaaagcagtcatccctggacacctggctctggtgttccacattggaaccagaagtccatggagccacactttggtcacctgcctctcagaacatgtttcctcccacagattgccactagtacttacaggtccgtaagaagcacttgaagaccctacaagggtaagtggaggaaatccagaagctcattgattccagcaatgggatctctaggattgggactgtggtgacctgggattctttacttaccgcttttccaggccttgagcctagggactctgaacaaaaatatgtccagggtgagtattatatgaggtggtgcctgttgctggcaaataataggatgaatgtggaagtttgtcccagagataagtacaggtgtttggagctgcttggaggtgaggctgagctggttaagagaacctcaagtctcatttccttctcatgggaacagagagcagaggtacaggagttagaaactaaatggctgtctcagatgtctttgttctggagatgatggcagcaatgaagatttggagcagaagagggaggtgatcttccccaggcctcatgaggctcctgtggctgagcacagacaacagactgtgggtttaagggagttggtagcaataccaaagaggaaagaggagactactgcaatagtccaggtgagtgtagatgatgtgggccagagtagtggccacagtgtggcagaaatggttgaattttggattgtaggtcggctctgattttctggtattgggactgagagataagaaggggtgactcaaggctttttgagtttagtagctggaagcatagaagctccatctactgggagagccaagtagatagtagaattgtttttcactcaggacatcaggaatgtgttttgtccatgttaaaaatatgagatgttttagagaataagtaagtagctatatcaagtggctaggtggacacacaggtcttggactctgaggaagggtgcaggatagagacttctacaaagagtggaggatattattgaactaggatggagccctatgtctgttaggccatttgcattactataaagaaatacctaaggctgggtagtttataaagaaacaaggtttattacagcttatagttctgcaggctgtacaggaagcttagcgctagtctccacttctggtgagggcctcaggaagcttccaatcattgcagaaggcaaaaagggagccagcaaggcaggagggaggcaccagtctctttttagcaaccaggtctcatgtgaacttattactgttggaaggatactatgccattcatgagggatccacctccatgacccagataacctcccactaggccccacttccaacattggggatcacatttccaggtgagatttgaaggggacaaatatccaggctatatcagtgtcttaccttgggttgataatgaaataacctatattggtggcttaaacaacaaaaatttgtttctcacagttctgcaggctaggaaattctacatcagggtgcctctagattcacttatttgtgatgggctgcttcttgacttgcagtggctgccctcttgctttttcctcacatggcctttcctgggagggagtatgtaaagaaagcaaggaatctctttctttctattcttacaaaagcattaattccatcatgagggccccactcttttgaccttatctaaatctaattaccacccaaagattccatctccaaatactatcacattatattaggcttcattgtgttagtgcttcaatgtaagcattttgtgggtgggcgtggggcagaaacattaagcccataacatcatagatcccatttagtagtgggattcctggtcatgatgataatattaatagcaggccaggaaggggaagggtgggagccacaagagggtaccatacttgggtatctggatggatgttgtggaaatcacaaatacaggttatagagggaagcagccctaggaataatacagagagaggataccaggcaggtggccaagggttatgaaggatgagtgaatataagatggatgtggaggctgcattagtccattttcgtgctgctgataaagacatacctgagactgggaagaaaaagagggttaatggacttgcagttccacatggctggggaggcctcacaatcatggtggaaggcaaggaagagcaagtcacatcttacatggatggcagcaggcaaaaagagagtttgtgcaggggaactcctctttttaaaaccatcagttcttctttttttgagatggagtcttgctctgttccccaggctggagggcagtggtgagatctcagctccctacagcctccacctcccagactcaagggattctcctgtctcagcctcccaagtagctgggattacaggcatccaccaccacacccagctaattttcgtatttttagtagagacggggtttcaccacattggccaggctggtctcaagctcctgatcaagtgatccacccgccttggcctcccaaagtgctgggattagaggcgtgagccactgcaaccagccttaaaaccatcagttctcgtgagacttattcactattgcgagaacagcacaagaaagacccacccccatgattcaggtacctcctactggatccctcccatgacacatgggaattgtgggagttacaattcaagatgagatttgggtggagacacagccaaaccatattagagacataatgggatttcagacaagatgaggctgaagccagacctaatgctttactgctatatagcctcaccaggatcttatgactggctcctatgcctagggagtttcatgcaggctggtggatcagtttaggggcagaagtagtcatctgggagcatcacttaaccttgggtggagggccaccaggcaaggttttgaatgaagggtagcaagacagttactgttactgttactgtttagtgcagttactgtttagtgcagtacaagttggaaagggccatgtgtatctgagatatgtatgtggttctgggtggctgaggttgatgaaaggagtagactcaggtaggaagggcttcagagcaggatatggggctgcctgtggcagtagggaccatcataggtctgggtagtcctggaacttgtttgaatttgcaagcactttctagatgtcttgtgctgagtaacatataggaaggcaggagagatgcctgtgttgtgggatcggggtggaggtggctgagggagtgagttgggtaagagaggtgtggtggaaagagtgatgcacatatgaagacggagtgtgagcttttgtttcatgagtctggacattgaggacatgagggtgaaatgtgaacccagaccttcagttgtgtttgggagccatggtctgagggattccaggagaatttatagacacaagaatgtggtttctatctgtccacctgcctgttgttgctgtgggagaacacagtgaccaatgagaccatgagagagtaggcatcagtggcatcagggcctgttgtattcgctgaggtggggagatggggaggagggtgagccagggatggatgtttgggggaatcaacttggggtcctaggaaagatgctgaccatggaatgaactgtccccatcatagcaggtttttgtagcctttgaggatgtggccatttacttctcccaggaggagtgggagctccttgatgagatgcagaggctcctgtaccgcgatgtgatgctggagaactttgcagttatggcatccctaggtaaggccctcctattcctcccagtttcctttgtgggtctctccttttcccctgtccctgaggcagctctgtcctttcttcagttagaccctgagctctacagaccttcccactttcttggcatatgtattctgagggacatcgccaagcaaggcactctcagactgtcctaacacctgtttcctctaggtatgcagtgaagggtctgggagacaggatctttctttcaacctaaaggatttgtccttgccttctccatgacaggatggctttctccagttctaggatgctctttgttccatgttctgccttttgcttctaactaaaatctcaagctgcctgtttcaggaattgcaggtatcatcatgttaactacttaactggtccataggcttttcataaagatccacctgaaagattttcttgtaacattatttttcactgctgtagtttgtcatgtgctgagttgctctgtgccagtgctggctgtgcacctctctggtcttccctttagggcatacatcttataggtctggtatagttgcacaactgggattcgaggatggctctggttgctttacagggtgcaaacagcaagatagtctcagaggaggcctggccctaatgagtgacaactaagggagggcaagacactagggctgtttctaatcacaccataaacctgtcctgagttctcagtgattgggtgctgattccataggacatatatcatttctctcttttttttcttttctacacatgttctgatttttatttcatccatgacttccagcccttagctgctaccaatttctggcctccatgtgtcacctgttcctttccagtgcaacttctagagtgttctctaacactgacccacatgtaatatgttgtcagatgtgcacatgtttttaaatagtccttccacacctagtattcagttcccatgggtgtctactgggcctggacaccaataatcttctgtgcagtgtaccgaagtcctctcttctcatcaggggaggaagtcctgataaaagcttttggcagaatagtgagtcagagaccctacctgttctctctgagttgtgccccatctttgtgtctttcatctcataaggcctcccttgttctgtgacttgtagaggcttttttccacaaatttccaccagctctcatatcctaaaaacattttcttagactcattctttgacacacatttttgatgtaacttctcacaccatagtaaatctgtgttttctcagcatttctcttctttcaggttgctggtgtggagcagtagatgaggggacgccttctgcagagagcgtttctgtggaagaactgtcacagggcaggactccaaaggcagatacatccactgataagagtcacccctgtgagatttgtaccccagtcctgagagacattttacaaatgattgagctccatgcctcaccctgtggacagaaattgtacttgggtggagcatcaagagatttctggatgagttcaaaccttcaccagctccagaagcttgataatggagagaagctctttaaagtggatggggaccaggcctcatttatgatgaactgcaggttccatgtgtcaggaaaacccttcacgtttggggaagtcgggagggacttttcagccacctcaggacttctccagcatcaggtgactcccaccattgagagaccacacagcaggattagacacttgagagttcccactggacgaaagcctctcaaatacactgaatccaggaaatcttttagagagaaatctgtattcattcaacaccaaagagctgactctggagaaaggccttacaagtgcagtgaatgtgggaaatcctttagtcaaagttctggctttcttcgacacaggaaagcacacggtagaacaaggactcatgaatgtagtgaatgtgggaaatcatttagtcgcaaaactcacctaactcaacaccaaagagttcacactggagaaaggccttatgactgcagtgaatgtggcaaatcctttcgccaggtatctgtcctcattcaacatcaacgagttcacactggagaaaggccttatgagtgcagtgaatgtgggaaatcttttagccacagcactaacctctatcgtcacaggagtgcccacactagcacaaggccttatgagtgcagtgaatgtggaaaatcctttagccatagcactaacctctttcgacactggagagttcacactggagtaaggccttatgagtgtagtgaatgtgggaaagcatttagttgcaatatctaccttattcaccaccaaagatttcacactggagaaagaccttatgtgtgcagtgaatgtgggaaatcatttggccagaaatctgtcctcattcaacaccaaagagttcacactggagaaaggccttatgagtgcagtgaatgtgggaaagtttttagccaaagctctggcctctttcgacacagaagagctcacactaaaacaaagccttatgagtgcagtgaatgtgaaaaatcatttagttgcaaaactgacctcattcgacaccagacagttcacactggagaaaggccttatgagtgcagtgtatgtgggaaatcttttatccgaaaaacccacctcattcgacaccagactgttcacactaatgaaaggccttatgagtgcgatgaatgtgggaaatcctatagccaaagctctgccctccttcagcataggagagttcacactggagaaaggccttatgagtgcagagaatgtgggaaatcttttacccgcaaaaatcacctcattcaacacaagacagttcacactggagaaaggccttatgaatgcagtgaatgtggaaaatcctttagccaaagctctggcctcttaagacacagaagagttcatgtgcagtgaatgtgggaaattattttgtcacttttttttttttttttgagatggaattttgctcgtcacccaggctggagtgcaattgtgcaatctcagctcactgcaacctccgcctcctgggatcaagtgattctcctgccacagcctcctgagtacctgagattacaggcacccaccaccatgcccagctaatttttgtatttttaatagaaacaaggtttcaccatgttggtcaggctggtgttgaactcctgacctcaggtaatccacctgcttcagcctaccaaagtgctgggattacaggcgtgagccaccatgtccggcttgtgttgtgacatttaacacaagatttcccaaagaagaaaggccttatatatgctgtgaatgtgtttttgcttgttagtttgttttaacttggtatgacggcactggaggctagcctttgagaagagccttctctgatgtgactcatgtatccaaacatccatggatttcccataaatttgaggtatgtgggaagcatgtgtagctatgttgtactctctaaacctgcccagggaccttaccagattcgtgtcactgccagtttctgcggctgaagccttttcatcactacccgctgggagacccacagagtgtgcatcagtcaccaccccaacatgctcagggaggcagagttcttccattagttggaggaaagcacgagtagtctaagctcttaggggggtttctcatttcctcctgtggctacatagtgcatataactaccccagtgttggccccaggacctgatctgagttctgctggcagcttccagaggattgccttttttgaggacattgttgatctcaggcgatgcttgtgatgaagcattttttagcttccaccacttaccaggaactgcctgttaactggcttgtgcaatgataaaggccttttgtttaagtacctttaatcttgtaagttgtattaattgttgagtagtttggaaacataataggactctgtcagcttaaaagggtatataacatttgtggggattcaaattttgtttgcctcagaggggacagtatgctcacagaatatagattttgctccatttttggcctatttcgcattgtttccaaggccttctaggagacactgcagggctttctggctctgatttttgcctgcatgtgggctcagaggtcattctgcagagggggcagttgtggcaacttccattgtttctggagacaacacaaagtttttcttgttgagtgaggatatcacataatgccctgcaatgtttagaatcccttaatgaggtcctgtgaaggagctgtgtcccttgaaacacagaattcagtgagctagtgtccctagctataaaaccatggggctggagcgaaacataattggtaaagaaacgctgggttgaataatagggaatggaggagactgcagcaaattagatggactgttcctcatataaagtttcatccggccgggcgcagtggctcacacctttaatcctagcactttgggaggctgaggtgggtggatcacaaggtcgggagttcaataacagcctggccaaggtggtgaaaccctggaaggctgaggcagataattgcttgaacttgggaggcagaggttgcagtgagctcagatcacaccactgcactccagcctgggtgacagagcgagactgcgtctcaaaaaaaaaaaaaaaaagatccattcaggccagtcacagtggctcatgcgtgtaatccctacactttccgaggccatggcgtgcagatcacttgaggtcaggagtcagagaccagactggccaacatggtgaaaccccatctctactgaaaatacaaaaattaaccaggtgcagtggtgcacgtctataatcccagctgctctgaaggctgacgcaccaagaatagcttgaacccggaagtggaggttgcagtgagctgagaccacaccactgcactccagcccgggtgatggagtgagactctgtttccaaaaaaaaaaaggctgggcgtggtggctcacgcctgtaatcccagcactttaggaggccgaggtgggtggataacccaaggtcaggagttcgagaccagcctggtcaacatggcgaaaccctgtctctactaaaagtacaaaaattgtaaaagtaaaaagtaaaagtaaaagctgggtgtggtggcaggcaccagtaatcctagctactcaggagacaggcagaagaatctcttgaacctgggaggtgagccgagatcgcaccattgcacttcggcctgggcaacaacagcgaaactctgtctcaaaaaaaaagtatccacaaatgttccagtgactatgactgcaagatcactgtgtgcagaaatctctagaaatgtgtgtcttgtagctcaagttattactagagacaacaagggttttgtggattcctgtagcctctctggcctgtttacttcaaggccattgctgcacagacaaaaaaaaaaaaggatgaagtcaagagagattcggttgtccttggtgcggcttttgtgatccagtagcaatcctcttaacgctgatggaaatggccttcattgctcacctgtatttcctgccactgaagcaggtctgcctctacgtggcctggggagctagatggtagagtcaatagagacttagtaaaccagactttttgaagtgtcaatgaccaagattgttattgcatccattaaaaaaaaatcaagttataattgatgtggaataaattatatatatttaaagtgtacaacttgataagttctgacataaatgtaaacccatggaagcattgttgtaatcataagaatgagcatatctcacctgcatattttacttttgctcttttataatacattccagaatatgcaggcaacttttaacattcctttacaattgattgacttgaattttctggaattttattttagacatcataaagtgtgtatttttttgtgcttttatttataaaacttccccttaggtaagggcctgaggttaactttggaggtgacagatatgtccaacaccattgatagggtgatgatttcaaaagtgtacatatgtgtgtgtgtgtgtgtgtgtgtgtgtgtgtgtgtgtatacttactgttttaatatgtgcagtacattgcatgttgattacacctcaatgaacctataaaaagttattccatttaaaaatctgggcctcccacttctattggaaactggacaacttgacagcctgcagtgttttgaaacagcatggattgggtgtcttgtttccagcatatgtcccatgttccccaacactgttcctcaggaaacagggaggaacagctgttcctcaggacctgctgagtggccatattccctgaaggccagaaaagtaacaaggtgaccgttttggacaaaattctgagcttaaaaccttgcctgaatcagtagcccccaaattcattgtgcacatcttataatttccaagaacacacatattaagtgaatatttttatgtttataattgtgaaatggtctgttcagggctgtcattcctcaaccttttttttcaaccaccctctcattaaggaagcatatgtattaatcatggtttctgttttttgtattatatgtcttgacatcttaaaattcttgctggtgacagagagacttaccctaccagaggtagctaatttctaaaaatagtaaacaactaccttgagagcaaggcaagccaactaccctctttatctaactcttactcaccaagccaatactttccctgcactaaatcatcccagcgttactgccagtgattttgcagcagtctgcagcaattttggtccttgcctcctcagaagaaaattcaaccgaggaggcagaggttggcttaaggcacaggaagagaccaaggcaagttttttttagcaggagtgagagtttattaaaatgttttagagtaggagtgaaaggaatcaaagtacacttggaaaagggccaagtggataacttgagaggtcaagtgccccacttgatccttggcttgggactttatacatttgcttatttcccaggctctttattctccttccttcggtaggctgttgcttgactactgcatgcacagtggtctgccagtacttgggaggggccgcatgcagtttgtttactgaagtcatacatatactcatttggggtgatcttcccttaacaagtcatgcacccccagaggaaggtcaaataccagtcaaattttgccatcttgccccattttgtgcatgctcgaaaccttatcaggggttgtggttcactggctccaggtgttttctatctgttggaaaactcttttccctcctggtaccaatcatggccacttatcatctcagagggatagttttatgctttcctgtccttcacccaatgagagctggacatctcgggggtccctctcttgttttgtttattatctcagaggaaaagatttatgattgcctgtccttgactccaaaattgcctgacattcctggggtccctctctcctgccctactcttatctacctactctaacaccagggtgagggtatgaggcaactagagaccacccctgtaaatcgaagccaaccagaattattcagactagccagtactcagctgtttgctctgatctggcctaggctttcccctagctcttgcttcttcctttagactgaaacctgttcctcctgtggccctgcatggcatactgtacttcccatttctagggaaattctgagtaacattaaacttttatttcactggcattgagctctccatgtccttttccaataaagacccatccacaaattggcctctcttggctatgtaatattacatatctttccagcacttctcaatgccttcaccttctcttttctccattatgcctgccacattctaacattccatataatttagcatttttttcatatttcctcctctttcttgagtacagcgtaagctattggggtctgtctcttgttttgtaaatgtcccatgcagttaagatagtgtctgaaatacagtaggtgttccttgaatatttcttagaactatgaataagcataatactacagcatccctgttcaccttaatattctgatagcactttctaaatgttttctttacttctccttccaggtattattgagtgttttcaagaatgaaaagaggcctggcatggtggctcacatctgtaatcccaactttttgggaggctgaggtgggaggatcccttgagcccaagagtttgaggctgcagcaagctatgatcgtgccactacactccagcctgtgcaacacagtgagatcctgtctccaaaattaaataaataaataaaattacattttggagactaaacgctgcttgtagtcatagttctaacacagctgtgtgctcagcttcatttgctcacttctcagaattcaatgtctcctgctcaaattttgctgtcatcttaaccgttttcacttatcacagatatgtttctccaggtccatttcgtcatgtatctgtgaataactacagaattattaactttgagtaatttggccgggcgcgggggctctcctgtaatcccagcactttgggaggctgaggcgggcagatcacgaggtcaggagatcgagaccatcctggctaacacggtgaaaccccatctctactaaaaatacaaaaagttagccgggcatggtggcaggcgcctgtaatcccagctactccggaggctgaggcaggagaatagtgtgaacctgggaggcggagcctgcagtgagctatggtcgcaccactgcactccagcctgggcgactgagcaagactccgtctcaaaaaaaaaaaacacaaaacaacttttgagtaatttaaacaattcacaaatgtttttgtctttctttccccatacactcgcccttttcttttttaaaaccataaataaatctcaattctcaattcagacactgtcggtgtaattgcaggtgaaatgagaatcacctcccagccaagaaatctgatcccaattttccaaatctttatttctgggttcagacaccacattttcagcccctgtcttggcatataaaagcatttataatggttcttcttttcagataagaaacatcaccaaaaggaaatagatatatctcaacttttgggctaggaactctcatttggataaaagaatatttctcctttggttggacattagtgaccatacaggcaggaaaggtgccttccttgaccaccttctctcgcctgtcttcctcctcatggttctctcaggtattttttttctgaggaaaccagaggaagagctctatattagtccacttgcctcagggagctccagcatccctccatagccactgtctggagaccattcttccactccatggccctgcctggggacaattctctgttaactctgacccaactgaggctcacaaaactgactcaaagcttccctctacagtacacatattttttaaatgaaggaaatttgactgaactatgagtggactcagagtgacattggatgttgtgtgtccatttggtggtgtggcttcagggaacatctgtaagaatatatcccaatatttcggggatccctgcagacctcactacacaagacctggttgagggtcctttaaaaggagcgaagccacgccctgacctcagagtctcagggcataatttctcagcgcccctcgcagtaccatttggcctttgcccagcgtgcaggggagttagccgtcaccacggccaagtgcacatgagaactgcattgcccagaaacctgtgcgccgcccggcggcggcactcttaggggcgtctccctgcggacggaagctctctgggcgggacttccggtatcttcctcgcggtggacatcttgtcggctcttaggtggaaccatcggagcagaagctcggggttgctgggcggttccgaggtgacggaagcgggagggtgcgggagaagtcgctgttcgctctgcggagtggctcgccagcgaagaccccgcctgcgcccccggggacggacgaccgcggtgccagggtcccgcgacctgggaccccctcgcggctccgggtggtctacgaactgtgatggcggcggccgcggtgatgggcccggcgcaggtgggtgctgcctttcccagactttcgcccgccccaaatcctgaagttccaaatgaggagcgcctgtctgagtccctgcagcgcaggccccagtgtccaaggcagcggggcgctggtgggtgggggcgagtgtgactggcagaggggcagcctgagcataggtttggagctggactgagcccgtagcagtcgggagcgtgtgtgaaccgtagtcaggcctgcaatgtcgaggggagaagttgctccttcattgcgaggacgataggagccatggcgggttttgaatggtggagggaagggatccgaaaaaggatttttaaagtattccaatgtttgctgaggaggaaaccgactacagtgaggtagaaacgatgaggatggaggcaaggagacgtttgaggaggtccctgcaacaaactccagaagtgttgcggtggtggctgggccagagcagtggcaggaggggttgggtggggaagtcatgagattctgggtagatttttaaagatggaaccaatggggtttcctgccgcatcagatgtggtcgtgagtgaatgtagggaggaaagggctatccagggtttttttggcctgttttccttcctgaacgtgtgaaagaatggaaattggtaagtcacagcagggagcacgtttcaggggcatcaggaattgggttttggacttggtgaatctaaggtgttctgcactggaggttcatcacgggtagctgaacatgcaggtctggggttctagagagggagttgtgctagagacttcaatgggtgaggcataaggtcaaagcctgtagtagatcagatttagagggtggaatttcaaggaagttattttgtgtggtctctgaagtgagaggtgggtttagggtggaaggccagggatgaaggggtggacacttaagattccttccagaaaggaggggtcctggcatgtgaaagcattctagatggtgttgttggaagtcaatgcttggtgctgcaaagtgaaaccagcactcaggcaaaagttttctcagcaaggcaatttacttctgtgcaagtgtgctgcctgtgttaatcacgatcccaagagcacactgaacaaaggagggaaggggtttttatctctaacccatagtccctaccttcctctgtgtcactcccccatgggctggggtcggaccgcttaatctaagctgagccaattgggtatttgtgagtattttccaaataaggaagagggaaggggaaggtgagttacagtggtgggacatgtgagttgtgtaggacgtgtggttttggcgggggcaatgggtgcaaagtgagtaagggaacagatgtgaattattggttagtgcttacaggaaggttgtttatagtaactaggggcaaggaggcatggagaacaagaaaggtttgagaacaaagaacaaggaagttaacaggctaaacctttgaagaggaattttattatatcttatagtgtcagcaagaggagagggctgtagagcataagtagcctggcctgcactggagaccaaggtgagggatgcagtaggtttgccaccctacaggctcagcatgccttcatgggcgctgcctgtggagcagtcccatccccaaccagtgcattggtgcctcagttacccaaaccctcaggtaagcagaattgatgaacatctctaatgaaggatcactgcagctccccttcagaggaatatgtatcaggtaggctggtttagtgcaagggctagtgtacaccttgcaagtacgcagaaggaactaaaaaatgtatgtacaaagtaagggaaatttatactagcacttaatgattggtcaaaatattaagttgccttgaagtattttattacaatggaaaaatcttaaccaaattttcttaaaagctttaaagcaggcaaaacaaacctaatttttcaaaaactcatcagttcatttgcatggatagtagtagctgtttcaaaggcacttgagatgtacagacaagcctgatacaaacagtagccctatgaggtgggtgccattattatccccacttttaagatgaggacactcagacgctggtctttatgttcacacagctggtgggagccagcactgagatctgagtatctgaagttagagaggtaacccaaaatcattcctgccaaagggcagggtaggcagggcttagggaaacagttcagtcgatgagatcccactgtgggaacctgccactcccagcttccctcctcttgtgaggttgccatggtggcagaaacttatgattcctacctagatgagagtagattgtctcaggccctcacttagcccaacacacccccattatctcagcaactcagtgtggagaatgatagtgttctgggactcttcagtgtcccttctgcctaccgttcttggaggtcctgcagtcacccaaagctctgtgttgtaaattctgttttggaattatgtggaagggtttctatttctggcaagcaatgggatgaaatgtggaacattatctcaggcataggaaccagcatgtgcaaatacttaacttaaggctaaactaggagtgttcagggaacctcaggcctccattatgtctggtgggatcagacagcagggacaggattcagcccagaaatggcagcctgaggatctgggtttgtatgctgagagaattgggagccactgcaggtttggagctaggagggagtgatctgactttggtcttaaccaacttcctctgtacagtgaaaaaagactgtgggagtgaggatgaaggaaggaataccactgaggagcttaatgcaacagttcaggttggaccagagtggtcgctgtagaggtgggagatgtggatggattctgaatcatttttcttaaagtgggaccaaccagattttctgatgtggaagatgagaaagaaaaggcaaggggtgaaggaagaccctggattttttagtctgagaagatataaagatgccatcaactgaagtgacaaagttggtggtaggagtacctttcagaggtaatatcaggagtgcagtttggctatgtggaatctaccatgttccaaagacacttgagtggaggtgtcaagtagacagctggacacagagatctgaagttcagagaagggattcaggttggagctatccacagggtggcagccagcatgtggatcaggatggagctttgcttccaatttagagagagaatctttaggtcatggtgacagtgccatcagcacactgtaagggcagacacagcagggtagaggtaggggccatcttagagtctagaagagggagggaaatgtccctgggaggaaggggaataatagggtcaggcaggtggcaaagcgttccaggcagagagtggatgtgaggtgaagtactgtagtaatagaagtgaggtggcagtgaggccagagccagtgcttattcagctctttatgtgctcctcaggcttccatggtgacctttggtgggacctgtggagtttcagtcaagctagtgaattagcccagggacagattgggtcagtaggcagaatccctgtgcttggggtaggtgcccagtgagtgtaggttttgaatgagttaaatgttgagaagcctgtgactgacctcagtagtacaacaacaaagcagaaaagggctgagtttatctgggatctgcacatggttctggattgctgaattgacccatgaaatagagccaggaggggaagatttaataggtggattcagggcaacccatggcagtgtggccgttgatcaggaccagatgtaatcctggatgcattatccaagcattctctggatgctgtgtgcagatttgcatgtggggaagccatggaggtaccagtgttgtgggtgtccatagatgtaaaggaggtatagccaaaagggtgatgtgcacatggagatggagtgtgaattcatgagcccagagctttggtatggagggtttctgaaagaatgcttagctcaggtttgtgtatgaggaataatctgttgatccccagggagctggctgataggagaagggttgggtcctacataccaggcccatggtgttttatctgtccacttgcctgttctgagctggacaaaatgattaatggaatatgagtcgagaacaggcaccaatcacaccagggcctgttatctcatttgagttagatgtgacaaggagtcctggagagagaggctgtccttaagctcagttgtccacctcacacagggctatgtgaccttcaaggatttatttgtttacttctcttaggaggaatgggagctgctggatgaggctcagagactcttctattatgaaataatggcttctgtgcttcgcatttatagtctccctgggtaaggccccagtatcccatttttctgggctgggtcctactcttcctttttgccctaggggttgctctttcctttccatagctagagcatgggtactgctctcttctctgattccctcacataggtcccctgggtgcctaggctcagctagatgcattggcccctctcttccctgtgttcctcaactcctgctgccctgaagccttgccaggaagggtttggaggtcaggggtcctaaggtgacccagtgaattctgcttggcctctccctggccaggtgactgtccacactcatgacacctctggactccaggctccacccgcttcctctaattgtaatttccttgagtctgcctgtgtcctcaatttcagtcatcatggtcaccacttgtgggcccactgcactgttcctgcaggacaattttctgaggttcattttgtagcatttgttttcttgcaattttgcatgggtgggctactctggctagtgctctcagcctgtttcacctttcccctatgctttgtatcttccagatcctctgtggttgttgaattgtaacaagagagagaactctggctgcctgagagggcatgactctagtcacagcaggaggggcttggacaggccctggtgagtgggagctgagggacgccataacctcagggctgggttcctgtagttccggaaacctatgttgtgcccatcacaagtgccaaggccagaggccctaacttatttctacctttttatccccattctgtacactcttgtcatttctaatctgacttctgacccagggctgtcttctcccattctctaccagaggggctctagtagagcaatagctctctctgcgatgctttccaatattgtactacacttacactattgtgtcataagatgtgtgcatatctgtaaatagtccctgaacacgttacttatttttaatcacattttcctgggcctgtactcacatttcgcataggagtcacctgtcacccacagtcagccaaggtcctgctaaaagtcattgcagaggattaagttggagaccttgtactacaccccatcctcgtgtctttgtttcttgtgaggccatctccattctgtgactcttagattccagtactgtacagcagcccttttttcaacctgatcctagctctgttccaccaggaaacttaggtactcagtcctgggtacagcagacacatatttgtgatgtagttgccccacccaccaaagtcagcatgtacatcaatagtatttttctgccttcaggttgttggcatgaagtgaaggatgaagagtcatcttctgaacagagcatttctatagcagtgtcacatgttaatacttccaaggcaggtttgcccgcacagacggctctcccttgtgacatatgtggccccatcttgaaagatattttgcacctggatgaacaccagggtacacaccatggactgaaacttcacacatgtggggcatgtgggagacaattctggttcagtgcaaaccttcatcagtaccagaagtgttacagtatagagcaacccttaagaagggataaaagtgaggcctcaattgtgaagaactgcacagttagcaaagaacctcatccgtcagagaagccctttacgtgtaaggaggagcagaaaaacttccaggctactttgggtggctgccaacaaaaggccatccacagtaagaggaagacacacaggagcactgagagtggggatgcatttcatggtgaacaaatgcattacaagtgcagtgaatgtgggaaagctttcagccgcaaagacacacttgtccagcaccagagaattcatagtggagagaagccttatgagtgcagcgaatgtgggaaagccttcagccgcaaagctacacttgtccagcatcagagaatccatactggagaaaggccttatgaatgcagcgaatgtggaaaaaccttcagtcgaaaagacaaccttactcagcacaagagaatccacactggagaaatgccttataagtgcaatgaatgtgggaaatattttagccatcactccaatctaattgtacaccagagagttcacaatggagcaaggccttataagtgcagtgattgtgggaaagtcttcagacacaaatctacacttgttcagcatgagagtattcacactggagaaaatccttatgattgcagtgattgtgggaaatcctttggccacaaatacaccctcattaaacatcagcgaattcacactgagtcaaagccgtttgagtgcattgaatgcgggaaattctttagtcgaagttctgactatattgcacaccagagggttcacactggtgaaaggccttttgtgtgcagtaaatgtgggaaagactttatcagaacctcccaccttgttcgacaccaaagagttcacactggagaaaggccatatgagtgcagtgaatgtgggaaggcctacagcttaagctcccacctcaatcggcaccagaaagttcacactgcaggcaggctttaggagtgctttgaatacaacaggactcatcaatcagatgttgaatttcatgtatctgaacattgacacaaaggagataccttatggtgccaggtacgtgggaaccttctagggatatgttgcactttctgacttgctcaggttttttgccagagttatgtcactgtcaatccatgtggccgaaaccatcttaactctaccagctaagataccccagcattggggaaggcagggttttgtattgtccagtccctggagaaaatcatgaaatgcctgagttcattgggggtcctcattcccttctgtatgacaggtataggtatggatatgacccatttttagccaagagggtctgagctgtatctgctggtggcttatacaaaaagtttactttcttcatggatattcttggtctcacatacttgtaatcaagtttttccagcctccaagtcacctggcctgggaaagtacttgcctcatgttgctctggtttgtgataataaaggctttacagtttaagccacatttaatcttggggcttcttcttatggtctggggtggattgaaaacaggctctgccaaactgaagacagcctttgtgcggtgcctccaactttgcctcaaatgggacagtgggttgagggagaacagttcttagtccagttttgatgttaacttccatagctgacaaagcttgttaagtaagaattaagatcttgtgtagacctgatttgtctggattttagagttatttgagagcccatatttcaccttgaggagggtgctgctgctgtgacagcctgcagtgttttgaaacagcatggattgggtgtcttgtttgcagcatgtgtcccatgttccccaacactgttgagggaaagctgttcctcaggacctgctgagtggccatattccctgaaggcctgaatctgtttcacaggccactgttggtaagatctaaagcatccagtagggaaacaaaattgataaatattgagtgtgagtaattgggattggggagattgtggcaaactagaggggaagtgcccattgtaaaaacacatccacagacagtccaggcactaaggctgaatgggatcagggtatccagaaatctcaggatctccagggccatgttactgttaggtcaaggtcactggtgcagcaacgaatgtagtttttctagattcctctccctccctgggctctttacctaatgtctttgcggcacaggcggtaaccctgggagtaaagaggtgtggtccaaggaagtagcttttgtgaccagctggagtttctggtgactcttttggcaatggtcctcattgtttgccagtttttcttactactgaggaagagattgtcttcccaagatatttggagtgataagagtcaccatagtgaggtagagtcactcttagtgatgtccagttgtccagtttccaatagaagtgggagatccagatttttaaatgggataactttttataggttcactgaggtgtaatcaacatgcaatatattgcacatatttaaagtgtacgagttaagtcttgatacacacacacacacacacacacacacacacacacacacttgaaactatcaccctatcagtggtattggacatatctgttacccccaaagttaacctgaggcccttaacctttctctcagtgctcgccttcccccagaatccctaggcaaccactgagtagttttcactgtaggtaaatttgtcttttctagaattttatgtaagtctgcctataaagtgttaattttgcatgctgtctttcatgcaacataatttgaaatttgtccatggtatgtatgaacagtccattttaaaattactgagtcatattctgtatggatataccacagtttatccatttatcttaattgatgtctgtactccacccccatttttaaatattaaaaagctgctgcaaatattgatgcatgagtctttatgtggacacttagctgagaacatttttaagcagaggttttgaaggtgtgaccatatatcttactaattatagtaaaatatattggaaaagagatacatacagggaagaactgtgaaacagaaaagacctaagatttgatgatttgggaaattctcagcccatcttaattggaaaaaaaaaacaaaccattgaaattaagagattcattgttaggaaagatagatgttttagagagagagatgttttagagagatagccaaggatgtttgctgataccgggatcaaaacatacatcagaacactgtcacacaaaaagctctttgaagagattaaatgtgacttgtagatcccctcaatacaaacaatttataagaagtttaaactatcactcatctcagcaaaagccaaaaatatagataggggattccctaggaggaataatctgcataaacctcttttctaatgttgtgaatttcagtgatgtacaggagactcacaaaattcttgaaaattttataccagtggaaatgctcaccttgggtctaaagggaccttgaaagtatgaagttaaagggtgtaggcatgtaaagtgtgaagttaaaggttgtaatattctatacatgggactggctgcggaaacaggtgcaagcccttgctacctttcatgagaaaggaaggatgactcagagcagaggagagtccagtgggcagagtcctgaaccatgtgatattcccatgtcttgactcccagtggcatttgccaaactagatttcagattttcttgggattggtggttccattttttttgttttccccccttccatttcctccccttttgaaacaatgcatatacatataactattatcctaggtctttcccaaccttttgtttgggagcagataactagttttctagttttacagatccaaatgagacaggaatagcactgggtggtcacaggaggatggaaaatctcaacaccctggttttggtgcagctgaaaaaaaaaaagaaaaacccaaacaacagctaaaacgggaactaggcaaagaaaccgtgggataacagaaaacccaaaacaaaagagaaaactgccagaaccccagtcagggtgacatgtctgtaactcttccaggcaaacccaaataagggaggaggggtggtaatcaggggtccctgaaatcccctcttttcccagaatacctaatgattacccctattaaaggaacacccatacaattagaaacccaaactttgttttgcatgacttgctctcaggggcactcccacacttctctcttgtgtgtacttttgcttcacaataaaagctgcttgcctttgcttcactgtgactcgtcactgaattctttcaatggtgttaagaacctggatgctgctggggctgggatctcaccaacaatgtccagagacccccccgaaccccccagcaacacagagaagaattgtgccccaagatgggattatacctagagcctcatccatattggacttagacaatttagatgaaattggagactttagctcagtgtggaggcgcacacctgtagtcccagctgctcaggaggctaaggcaggagaatcgcttgaacccaggagacagaggtggcagtgagccaagattgcgccactgcactctagcctgggcaataaagcgagactgtctcaaaaaaaatcataaaatagtaaaaggcatcaaatttttgaggggaaatacctattggtgaactgaaaactcgacaacagttctggtgtgtgggataacatgttaatagccttgatcattttgaatttcataatcataaatgggattttgtttttgagatggggtttcactcttgttgcccaggctggagtgccatggcactatctcagctcactgcaacctctgcctcctgggttcaagcgattcttctgcctcagcctcctgagtagctgggattacaggcatgcaccaccacgcctggctcattttgtatttttagtagagacagggtttctccatgttggtcaggctggtcttgaacttctgacctcaggtgatccggctgccttgacctcccaaagtgccaggattacaggcatgagccactgtgcctggccttttgggattggtttaaagagctgtggaagacaattgagcaattaccacagagattagcaatggagttcctagtatatttgaaaatgaataaaattgttcctgggaaaattaacaatagtgatctcagtctaaattacagagtaagcaattcagagaggataatatgccacatatgcatagatttgtttaaaacagtaaattatatagcactgtaaaaattgaaaaaaatactattagaacaacaaacaattaggttgatgaagcacaataagagactaatgaaaaggaaagaaatgaaattacttaatatcaaaatgtatgaaataaatttaagccatatacaagcatgccaaattaacttgtgagattaacaaagagtgtattaattggggaaaaagactaggagtctgcaaatcctaagattaggcttaacactaagcctcttacaaacttcaagttttcaaaaaggctcaaggttttctggtacagaggtactatgggagcacagttcagatttaacttaacattacgttatttaggccaggcacggtggctcatgcctgtaatctcagcactttgggaggctgaggcgggcagatcacgaggtcaagagatggagaccatcatggctaccacagtgaaaccccatatctactaaaaatacaaaaaattagccgggtgtggtggcaggcgcctgtagtcccagctacccgggaggctgaggcaggagaatggcatgaacccgggaggcggagcttgtggtgagccgagatcacaccactgcactccagcctgggtgatagagcaagactccacctcaaaaaaaaaaaaaagaaagaaaattacagtctttaggaaactagatattcatcagagagtgtatgtgaccagaataagccatcttacgacgtctagatgacacagtaaatacttatgctgattcaaaattacctgagctacttcaacataggacatagcaaaacactgataattacattactgtatacttataaaagatgcttgtggctgggtgcagtggctcacacctataatcccagcccttcggaaggccaaggcaggcggatcatctgaggacaggagttccagaccagcctggccaacatggtgaaaccccatctctactaaaaatactaacattaggcaggagaattgcttgaatccgggaggcagaggttgcagtgagcagagattgcgccattactccagcctgggcggcgagagcaaaactccgtcaaaaaaacaaaaacaaaaaaaacaaaccatgctttcaaatctgcctaacaattatagcttcagagtccttgtattcaggattatctatttgtaacttactactttttacaaatatttttcttacactaaattagaaagaatgtttggtctcgcaggtgtctgagaatctttagtaaaatacccctacagattctattttggaatcatggttttaaaaaaagcaaaagtgtgtatttccaattaattgctacagagatgccaaatgtccactcagtagttgtgagtaaaacaaattgtcttattgctcttcacttcacaggcaaataaactcttcgagtgattgtgtgaagttcagagtattaggtcagggatgaaatggaggctaatccagacacgttataagagaaaatatggaatagagattctaggggcactaaagcaaatgcatgaggtggtctatgcttctgagtccctcatagtatgttccttctgagtatttgtattctaaacctcaaaattacaattttttgtataacatttcttactggattctccaagatataatctactttttgaagaatatgacatttatgtagaaatagtggttacttaccaaactggtatttgctactaggaaagtagcatcagtttttggcatgggcatctgaactctgagaataaggtttgggattccatgacctcatctccttgctgggaagtgatggtcattttattcttccacctgtaattgcagtgacagtgtctccaagaggattggagatgatctctgaaaaaaatttttgaagttagaaaattgtagaaagttattaacattaattactggagttatccatttagaatgacatcatacctaaaagagaaaattatctgtgaaatgggaacaaataaaggtaaatagaggaaacagttctaagacatgggacatgtaagttgaacccttggttatgctggaatcttggctcctatgaaatttttttttttttttttttttttttttttttgagatgtcttgctctgtcgcccaggctggagtgcaatggcgcgatctcggctcactgcaacctccgcctcccaggttcaaacaattcttcagcctcagcctctcaagtagctgggattacaggcgcccaccactgcacctggctaatttttgtatttttagtagcgatggggttttgctatgttggccaggctggttttgaactcctgacctcaggtgatccgcccgcctcggcctcccaaagtgctgggattacaggcgtgagccaccgcgcccagccgaaattcttatttctacaaagtctgacattttttcattcatatgaatggtgaggaataacaaacttggaaggaaagaaatagtaaaaagagagtgagagtacaaaggtgaaagagttgagggaaagcattactcaacatcttatctggttcagaggctcatctagatttgtatttacagcagtgaacaacctacaaagaaatgtattctcaagtaggctttattcaaattaagagatgtggtctggaaataataaagaaaatattggaaaatatacactaagttataaagagacagattctatggaaaatatcagaataccagcaccaagtaataacgaacacgtgaagtaggtagaatttctataggaaatttctatagtcagggttgtccttatagtggagataatatttgagcatatatttaaagcacagcagagagagagtgatttgtaaacacagagaaaatgtgctatggaaaagaaatagccagtacagtgtccaaaaagcctggaagtgaaaaatcatgtggtcaaagcacaattcaagagtgactggtgatggtttttataccatcaaaaatctccccaatgtgcacaattacccatgtatccattcacatgccattatctcagacctccttgtcaactgtcttctcaaacatattcttccttgcccttgatcacattgccaggtcatggactgctatcctgtaaaatacttgttctttggacacttattcctcctcataaaaaggtttacaaggtatgccacttgtgacttcacctatggggaaaattttgatccccaactatctttcaagaggatgcagaatatggctctgaggcagccacagttttgttttgtttttttttttttgaaatttatctttttttcccaccctgccttatggtgctgacacaatcttttttattactaggtttttaagagcacttttaggtttgcagtaaaattaaggggaaggtaaagagatattccatatactccctgcacctacataagcatagcgcccctcaccccaaccgcagtggcacatttgtagcaattataaacctacactgacacatcattatcatccaaagtccctactttactttagggttcactcttagtgttgtacattctatgtgtttggacaaaggtacaatgacacgtgtccactattagagtgtcatctaaaatagtaatcctctgtgctccacaaattcatccctcctacccttctaaacccccagcaaccactgatctttttactctttcatacttttaccttttctcaaatgtcattaattggaatcatacagtatattgccttttcagattggcctctttcatttagtggtatgcatacaaggtacctccatgttttttcacgtcttgaagattcatttaccttcagcattgagtaatgttccattgtctagatatactacagtttcttttctttctttgtttctttttttttttgagacggagtctcgctctgtcgcccaggctggagtgcagtggcgtgatctcggctcactgcaacctccgcctcccgggttcacgccactctcctgcctcagcctcccgaacagctgggactacaggtgcctgccaccatgcccagctaattttttttttttttttttttttttgtatttttagtagagacgggggtttcaccgtgttagccaggatggtctcgatctcctgacctcatgatccgcccacctcggcctcccaaagtgctgggattacagacgtgagccaccacgcctggcgatatactacagtttctaatccattcacttactgagggacatttttgttgcttccaaagtatgccaattttggataaaactgctatacacacacatgtacaggtttttgtgtggacataaattttccactcatatggataaattctgaaaaatatggttaccgtattgtatggtaaaagtgtgtttagttttgtaagaaaccaccaaactccatttcaaagtggctgtacaactttgcattcccgtcagcaatgagagctcctgttgctgtacattttctcaaccatttgcagttgtcagtgttacagaggttgttcattctaatagatgtgtagtggtatctcagtgctgttttaatttttacttccctgatgacatatgatggggattatcttttcatacacttatttgccatctgtgtatcttctctggtgaggtatctaaacctaaagtctttgcccatttcgttttttaattaagatgtttcttttttttcttttttttttttttgagacggagtctcacactgtcactaggctggagtgtcgtggcatgatctcggcttactgcaacctccacctcctgggttcaagcgattctcctgcctcagcctcccaagtagctgggactacaggcatgcgccaccacgcccaggtaatttttgtattttttagtagagacagggtttcaccatgttggccaggatggtcttgatctcttgaccttgtgatctgcctgcctcagcctcccaaagtgctgggattacaggcatgagccaccaagcccggccctgaaaaatttacacaattatacaaaacttacttaacctatgcttcattacctcatgaggagtactgggaagttttgagtacgtgcaatggatggaaacattgaatttggacataaagagttgtgtcctttttttttttttttttttggagtcttgctctgtcacccaggctggagtgcagtggtacgatctcgactcactgcaaccttcacttcccaggttcaagtgattctgattctcctgcctcggcctcccgagtaactgggattacaggtgccaccaccacgcccgactaattttggaatttttaatggagacggggtttcaccatgttggccaggctggtcttgaactcctgaccttaggtgattcgcccacctcggcctcccaaggtgggagcagcaatcacacctgctgggattacaggtgtgagccactgtgcccagccagttatgtcatttttcactagtttctcagttgattacctgaaagtatgaatttttaaagcacaataggattcagcagtctcaggtaggaaaaaggtaacctggaaagatccctgcatgtgaatgcacacacagctttcagggatctgaggaaattcagcatgtgtaggatatagaggagatacatggtaggaggtgaagcaatatgtaatggttggttctgtaatataggcccagccaagaactctaacctttttcctaaaaacaatgacaagcccattgtgagatctaaccagatgtacaatagtagtcattccacttataaatttttgtagtaaatgtgtaaacaaatacattatatatttgataaaatcatttcacaacttttaattttattttattttactggtattaatttgtcctaaaggatcatttttattgtgaaacgtaaaatttgatctatctaatatatataaaatgtatatgtgtacatttaacaatgtgcatatatgtaccttaaaataatataaactttctgggcgacggagtgaggccctgtttaaaataatgataataatttgatattttatgcattaaaaacttttgtctgggcatggtgactcatgcttgtaatctcagcagtttgggaggctgaggcaagaagattgcatggccctaggagtttgagactagcctgggccctatagggagactccattcctacaataattttttttttaactagccgggtgtggtggtgtgcttgtagtgccagctactcaagaggctgaggtgggaggatcacttgagcccaggaagtggaggctgcaatgagctatgattgttccactgtactccagcctggacaacagagtgagaccctgtctcaaaaaaaaattaaatgttttgattatacaaggaaaatgaacattcatgtattaaagcttcatgttttatgaacaaaactgactttgcaggcaggagagcgttttctgggggcaccagaagcagggaacttcccttgtccgttggcttcagggctgcccactatccctccactatcttcccattgtagccctgtctggtgtcttttgtccctgacaaaacctacaaaaagtgactttaacacttcaggctgcatgcatttgaagagcaataagataacgttttttcgcttcccactaccagtggagatctgctggggtgggctgcatggaatctgaaatgatgtctaaatactgaagtgaacctctacactagagactgatatacagctgacccttaaacgacgcaggggtcagggataccgacccctgcggaattgaaaatgcttgtattacttttgactcccctaggtcttaactactaatagccaactgttgcccggaagccttatgaagttgcccggaagccttatgaattacataaactcccagtcgattaacacattttgtatgatatatgcatgatatatgcataatatatatgatatatgcattttgtatgatatatgcattatatatattttagtataagaactatacttgtactaaaacagaccagagaaagggtatcaggaaaattgtaagaggctcgttgacattacacccaattaaaaaaaggaaaataaaagaatacggaagggaaaatacatttactaatcattaagtggaagtggatcatcataaaggtcttcatccttgtgttcttcatgctgggcaagagaatgaggtcttgctgtctctggggcaagaggtcggggagctggaagaggcaggaaaaggagcacactcgaagtaacgtttattggggaaaaaaaacgcctacgtgtaaatggacccgcacagctcaaacctgtgttgttcaagtgtcaacctacttaagacctcaaacaccgaagcccctcagtcgccctggaaggcagcagacgcagcttcctagcgctcccagctgtctgcacacaaggcgccctccgtcgcagcctgggggagactacattacccagaaagccttgcgtcgagcggcagtactttgatccaatgaaaatccaagacaggggcatttccgtgtgggtctacccccgccccccccagggcgggacttgtggcgtcttcgcagcggtcattttggctgccctcccggaggtccgttctgtctgtcagccgctttggtacgctgcatcgggatcgaagtgacggaccgtgaaggcgcgagagtcaggtctgagggtcgggggcagagccgcccgcgaggccggcctggggatagcgatgctcgggttccccccgggtcgcccgcagctcccggtccagctccgcccacagactcggatggcgaccgcactgagggacccggcttcggtgagcgctgcgatctccgggcctcccccggccgagattcttaagtcccaagtgagaggcaccagctcacgtctctgtagcacagggtcggggacactgaggctcgtgggtggggcccctatttctgacatccgatgtggtgggcagggggacaagggacaggaccggcgcgtgcagggcttggacgggcaaccgagaagggggcattcaggaacctgggctccacattgttactgcagggaacaaagtttgagagagatctacctttattcttagggccgtgggagccatagagagcttgcgcaaacgagagacaccatctgagttaaatttgaaaaatcctctgcaggctgttcagtggaagaaaagactttagagatggatgaggacgttgaggcagagggaggttgaatatttttccaaggccacacaactggtgagaggcagcactaaggaccgaggcgcacaggttagacagtcgacccaaagttacgtggctctgggccggggcaagggtacagggaaggcctgtgcccatggagcactgccatgatcacattcctctgaggcctgcgtctttccacaggttcccatagctacagaggtgcttttcaaacttacacaggtaagtggaggtatctcagcccctcactggtctggaatgtccctccaccctccccagacagatattttctttagatttgtggtgtcatgggactcacctaccattctctcagcgtttggtttgggaaccctggagaatccctgagctaagggccctgagtccaggccaatgtttccatttggagcagccaatggaaagatgggtgaaaatttatgatagaaacaggtaggtaccagcttttggaactccttggaggtgaggctgagctggttcagggaactgcaggtttcctttatttctgtgaagtttggcatctattgtgaggaagttggagtttgggatcagaggagggagatttatctaacccaagtgttgacaggatacagagtggaaaacagaatgaacacagtgactaatgggaatgtgaagagacagcagggatcaatgacaccaaggtctggtgtctcttctgacttggggatcttgggaggagaatgtatggggacatggattttgagtcttccaaattgagactgttcatggtttcatcaatccctattatgctagggaagtgtgacctttgaagatgtggccgtgtacttctcctgggaggaatgggatctccttgatgaggctcagaaacacctgtacttcgatgtgatgctggagaactttgcacttacgtcctccctgggtaaggccctcatactcacccttgtgccctggactaggctctctgtttctccttttcctcaggagcagctctgtcctcatatctggactataggcactgcctccttccccagttccctgggtagatgttgtggactgagtgcaagcctacttcccttatcgtcccagcccaaaagcatcttgggtaaggatttgggatcagtagtcttacagtaagcctaatagatcccacctgacttgccttctccctgtctggtgactttctagatctatggcacccagttttccctcccttcgtgtacctaacatttatttgtgctagactgtgacatgaaatgtagtcactgacattgccactatttacacagactgttcttcaaccaccaacctttccattaacagcagaacactctaacaaattgtgccgcagagacattacacagactgttcttatagaaacctccttcaaggtgtttttctttgtttttaattgtaaaatatatataacaaaatttaccattttaatcattttcaagtatatagttcagcgcatttagtacattcgcattattgtgcaaccatcaccaccatccttctatagtactttttcatcttataaaactgaaactttgtactcattaaataataactcttcccatcccctggcaaccaccattttacttttggtctgtatgaatttgtctactgtaagtacctcatatgagtgggatcacacaatatttgttcttttctatctggcttacttcacttagcataatatcttcaagattcatccatgttgtaatatatatcagaattgcttctttttaaggctgaataatattcttttgtatgtattacagtttgtttatccattccttcatcagtggacacaggttgttttcaccttctggctgttgtgaataatattactgtgaacatgggtgtacagatacgtatttgtgtccttgctttcaattcttttgggtattggcccaaaagtagaatttctggatcataaggtaattatttttaatttttaaggaaccactaaaattgtttttcatagcagctgcaccattttacattcccacaagcagctgacaaaggttccagtttcttcacaccctcaccatcacttgttattttctgatttttttgataagtcatccaaattggtgtgaggtgatatctcactgtggttgtgatttgcagattactgatattgagcatctattcatgtgctgattggctatttgtatatcttcaaatgatattgcttattcaagtcctttgcctatttttaaattaggttttattaattataattagaagtattaaatataattttttattgagctttaagggttatctgtgtgttctagatattcccttatcagatatgtgatttgcaaatgttttctcttattctgtgggttacgtttttagtgtgttgataggatcctttgatgtacaagtttctcattttgatgaattcagttttacttttttacttttattgtctatgctttttatatcatatccaaggaatcattaacaagtccaatgtcatgaagctttttccttgctttaagacttctatagttttagtacttacattcagatctttgatctgttttgaattaatttttatatgtggtgtcaggtaagggaccaacttcattctttcacatgtagatatccagttttcctagcatcatgtgttaaaaatttgtcttctttctcctggtcaaaaatcatttggccagatatttgagggtttatttctggggtctcttctagtccattgatctatatgtctttctttatgggagtaccacactgttttaatttctatagccttgcagtaagttttgaaattacgaactgtgagtcttccaactttcatccttttcaagattgttttagctattctgtgtctctcgatatttcaaatgaattttaggatggatttttttatttctgcaaaataacgtcatttggattttgataggtatcgcactttctatagattactttggctagtatagacatcttaacaatattgagcactctagtccatgagcaggcatgtgatctattttattaatgttttatttaattcattttagcaaaattttgtagtttctagtgtacaaggcttttacttgtttggttaagttaatctttaatgttttattctttttgatataagtggaattgtttacttttcaaattgttcaccattagtgtatagaaacgtaactgatttttgcatgttgtatttatattctcctatttgctgaatttccttattagttgtaacagtttttcagtggaatctttatggtattccatgtatatcatctgtgagcagggataattttactcctcctttcccattttggtcccttttctttctttttcttgcctaattgctatgttgaacagaagtgctaaaagtagcatccttatcttgtccttaatcttagaggaaaatctttcagtctttcattgttgagtataattttagctgtaggtttttttttttgcatatggattttattatgtttaggtaatttccctgtattcctggttttctgagtgttttccccacgaaaaagtgttgcatattgtctaatgctttcagtgcatcagctgagatgatcgttttaatttttttagagatggggtcttgctatgttacacaggctggtcttaagctcctggccgcaagcgatcctcctgcctcagcctaccaagtagctgggattacaggtgtaagccaccactttgatcagtttttgtttgttgaaccatccttgcattccaggaataaattctatctggtcgtagtgcataatccttttaatatgctgttgaattcagtttgctagtgtttggttgatggtttttgcattaataatcatcaaggatattggtctgtagttttattttcttacacaatctttgtgtcatttggaatcagggtaatgctggccatacagaatgagtttagatgtgtgtatgctacagttttttgagagaatttgaaaaggataagtattagttcttagttaaatggttggtagaattcatctgtgaagccatcaagtcaagggcttttctttaaggtttgtcttttttttttttttttttcttgagacagagtattgctctgacacccaggctagagtgcagtggtgtgatcttggctcactgcaacctccacttcctggattcaagcaattctcctgccttggcctcccgattagctggggttacaggcacatgccaccacacctggctaatttttgtattcttagtagagatggggtttcaccatgttggccaggctggtcttgaactcctgacctcaggtgatccacccacctcagcttcccaaagtgctggaattacaggcatgagccactgcacccggccaggtttgtcaattttgataaccttttcaaagaaacaccttttggttttgttgattttttttttatattgtttttctcttctctattttatttatctagactttagtctttattatttttttcctgccagctttggttttagtttgttcctctttttataatcccttaagttgtaaaaatagattgttgagttgagatctttcttctttttaatgtttatagctataaatttcccctttagtactgcttttactgcatctccaatttatttcccttctgatttcttcatggccccattggtttttcaatattgtattaatttctacagatttgtaaattttttagtttccttctattaagagttcccaacctcatcccactgtggttggagaagatactttgtatgatgtgtgtctaaatcaaatgaggcttaatttatggtctgtcctggagaatgtttttggtacacatgaggggaatgtacattctgttgttgttgggtagaatgctctttatatatttgttagagctagttggttgtttaggtcctctgttttctctcttctctctgattgttctatccgctgctgagagtcaggtattgatgtctctaactgttattgtagaactatccatttctcccttcagttctgtccatttttgcctcatgtgttttgatggtctattattaggtgcataagtgtttataagtgttatatcttcttgctctactgaaccttttattagtatataatatccttttatatctcttgttaccctttttgatttaaaatctctattgtatgatattaatgtagccattcttactcttttttgcttgctatttgcatggaatatctttttgtaggctgtcactttcacctcatttacatctttggatctaaagcaaatctcttgtagacatcataaagttggatcatgggttgtttttattttaacccattctgccaatctttgtcttttggcagagtttaagctaaaagttgggagcatttaaggcatttacgtttaaggtaatcactgataaggaagggcagacttctatcattttgctctttgttttccccatgtcttatagccttatagcttttttgatcctaatttcctgcattactgcttcttttgtgtttggctcacttttttttttttttttttttagtgaaacttcccttgtcatttcctttatgtactttttttttttttttttttttttttttttttaatggtgtctcactctgttgcccaggctggagtgcagtggggcgatctcggctcactgcaacctctgcctcccataatcaagcgattatcctgcctcagcctcctgagtaatccctcctgggattacaaacgcacaccaccacacccagctaatttttgtatttttagtagagacagggtttcaccatgttggccatactggtcccaaactcctgacctcagttgatccacccacctcagcctcccaaagtgctgagattacaggtgtgagccaccacgcccagttctttgtatacttcatgtagctctttttttaaaatagttaccatggggattacatttaacatcctaaagttacaacactctaacttgaatttatacaaacttaacttctttaactttccttgttcttttttgtgccgtgttgttctgggccagtgttagttgctcacatgtcctgtctttcccttaggacttatatcatcctggtctcatgtagttgctcaactagggctaggggaagtgccctctgttcttcacaggatgttcatgactccagcctcagcaagatgggatcagagagggcctggcctacatgaatggcacttgggaaaaggcatgtcatcaggtctgtgtttaaattgcaccaggaacctgtcctgtttgacttgtcttgatgccattgccagagacacttcacttcgaccttcccctcttcactcttaacagtttacaaacttgttatttctactacttgtcatttttattttgacttctagctaacgctaatcctcacctctctggactccttatcctacctgttcttttcactgttccctctgtagtgttctttaatattattttgtcctgaagtgtgcatatctcccttaatagtccctgaacaccagttactgttccagtgagattttcctgggcctgggcatacacttcacagcatcacttgtcaccagcagatgtgatcccactaaaagctattatcagaagaattaattgtataacatgcctcttagtcctgggccataccttagccttgtgcactgtacctgggagggcctaccctattccgtaaccttagggacaagtaatgcacaacagctgcttcctcaacctgaccccccaactcacttttcctaaaaacaggcccatatactggttctttgctgtaactgatgtgcatttgcaattgcattgtctcctcctaataaaggtaacatgtacttcaccatgatctctttacttttaggttgttggtgtggagtggaacatgaggaaacaccttctgaacagagaatttctggagaaagagtgccacagttcaggacttccaaagaaggttcatcttcccagaatgccgactcctgtgaaatatgttgcctggtcttgagagatattttgcacttggctgaacaccaaggaacaaactgcgggcagaaactacacacatgtggaaaacaattctacatcagtgcaaatcttcaacagcaccagaggcagcacattacagaggcacctttcagaagttatgtggacactgcctcgtttacacagagttgcatagtccatgtgtcggagaaaccctttacctgcagggagatcaggaaagacttcctggccaacatgaggtttctccatcaagacgccactcaaacaggggagaagccaaataacagtaacaagtgtgcggtggccttttacagtggaaaaagtcatcacaactggggaaaatgcagtaaagcctttagccacatagacacacttgttcaggaccagagaatcctcactagagaaggactttttgagtgcagtaaatgtgggaaagcatgtacgcgaagatgtaacctcattcagcaccagaaagtccacagtgaagaaaggccttatgaatgcaatgaatgtggaaaattctttacctactactccagtttcattatacatcagagagttcatactggagaaaggccttatgcgtgccctgaatgtgggaaatcgtttagtcagatatacagcctcaatagccataggaaagttcacactggagaaaggccttatgaatgtggggaatgtgggaaatcttttagccaaaggtccaacctcatgcagcatcgcagagttcacactggagaaaggccttatgaatgcagcgaatgtgggaaatcttttagccaaaactttagcctgatctaccaccagagagttcacactggagaaagacctcatgagtgcaatgaatgtggaaaatcctttagccgaagctccagcctcattcaccaccggagacttcacactggagaaagaccctatgagtgcagtaaatgtgggaagtcatttaagcaaagctccagcttcagttcacatcggaaagtccacacaggggaaaggccttatgtgtgtggggaatgtgggaaatcctttagccatagctccaaccttaagaaccaccagagagttcacactggagaaagacctgttgagtgcagtgaatgtagcaaatcctttagctgtaaatctaacctcattaaacacctgagagttcacactggagaaaggccttatgagtgcagtgaatgtgggaaatcctttagccaaagttctagcctcattcaacaccgcagagttcacacgggaaaaaggccttatcagtgcagtcaatgtgggaaatcctttggctgcaaatctgtcctcattcaacaccagagagttcacattggagaaaagccttagctgtactgagaatatgcaatttccttttagtgtaattatactgaaggagtacacctgtgagagagacaagtacctgatttggaagccccaacatctaaggatatacagtgggcggattccccttaagttccaggtatgtgttacactttctaacatgccatttagaaagtgttagactttctcacctgccatttatggctcttgccgtttatgtcactgacagtttctgaggcagaagccgtatcatgtctaccacctgtgaggtccacacagtgtgtatcatttacctcctgaacctgctcaaggaagcagacctctgcttctccccatttgctagaagaaatcatgaatagtctgagtcttcctctctgacaagttagggcatggacttgacccagctttgtgccagagaacccaatatgagtgttgttggcagcttgccaagaaggactgtctttttcaagacatactggtttcatgtgacacctccatggatttttttccagcctctaagtcaccaacttgggaactgcttgtctcacgttgctttgttttttacaataataaaagcattattatttaagctacctttatcttggcatttgattcactctttgaggtggttcaaaaacagaatcgggccctgccagctttacagagtaaacacctttggagggagagggaggtgtcatatgcctcagtgacaacagtataatggaaaaatacaactgtctttccagctttggcctaatctgaatttgaattattgcccaaggccttctaggaaatactgcaggatattatggtcttaattcgtggactggatgcaaggattttttgtgggctcaaaggacaccctgaggaagtgggaaattgtgacaaattccattgcttctgggaacaagatgaattttgttgttattcacaagggttattacatactgcccagcactgttgaggcagtctacccccagtgctgccaaggagccaagtgccccaatacaatttagtaggctactgtcactgtaaaatgatgggggaaccataattggtgtggaaacactgggttactagggagtgaaggagactgcagcaaactagatggaatgtgctccttgtaatatgttctagtaattgtgcaggatcagtgtgtacagacattcttagaatttccaggcatgtgtattttttgtagctgaggtgactgtcaaaaaataataaacaacctaaaggttttgtgtattccaatagcctttctgggatgtgcacctcaagaacattgctgcataggccaggaaaacaagcatagaaagaaggggcgggggatgtccttccaggaatgtgactttgtaacctaccatcatcctgtgtttaaatgaattcaaatcagtttcattgattaccagtatttgctgcccactgaggcaaggtgtccctccaaggtcatcaggaaagagagttaatgtagggttaccaaacctagtcaaaaacacattataccatcattataattattacaatgaacatatcagtcacctcggatttacctcaggcctttttctaagctctccctcccctctctggccctcaaggcaaccattgatttataccttcatttataataggtttgtttgtattttctataatatatgattttattaataaaatgtctttttttccagtttcattcatgatgcataattattttgagattcttcaatggagcttatatgtggtggtcattctttttattgctgagtggtatattttttatggatatactatttgttatccatttgtttataagcatttaggttttatctagttttggctattacaaataaagctgctagaaatgtacaattcttcatatgtgcatttttttcacttctcttgtgcaatgcctgagacacaggataaatgaatgtttaacttattaagaaatggccaaaaatgggctgggtgcggtggctcacgcctatactcccagcactttgggaggccgaggcaggcagatcacgaggtcaacagatcgaaaccatcttggccaacatggtgaaaccccatctgtactaaaaatacaaaacttagctgggcgtggtggtgcgtgcctgtagtcccagctgcttgggaggctgaggcaggagaataacttgaacccagaaggcggaggttgcagtgagccgaggtcacaccactgcactccagcctggcaacaaagtgagactctatctcaaaaaaaaaaaaaagaaaagataaatggccaaattgatctaaaatggctgtttgctcttgcttacctactgggaatgtgtgagaattccagctgtttcacatccttgccaatacttggcatggtctatcttttagaatgtacccttttaataagtgtgcagtagttttaattgcatttccctaaggattcatgatgttgaacattttttcatgtgtttatttgccaaatgtatatcttcttttttacacttttttttttttcttttagacggagtcttgctctgtcacccaggctggagtgcagtggcgtgatctcggctcactgcaagctccgcctcccaggttcacaccattctcctgcctcagcctcctgagtagctgggactacaggtgcctgccaccatgcccggctaattttttttttttttttgtattttttagttgagatggggtttcaccatgttagccaggattgtctcgatctcctgacctcgtgatccgcccgcctcggcctcccaaagtgctgggattacaggcgtgagccactgcacccagcctgccaactgtatatcttctttgataaaatgtctgttcatatacgttatctgtttgttaggaattgtgtctattttgcttttcattaacaaatcactagtttttgttccacaattaatttcatgctatgcacagtgtaattaccatatataccacacacttttaaatttaatctgtattattcacatattctctatcacattcttaagtctagacacttagtagtacagtgaatcaagctatggtttatagtgatgccagtttccctggtgtaaaacttcccattgtggccaatttcaaactgtcatcatgtcactgaatttggggttgggaagagccatcagaaacataccatttccataatagtgatccatatttaaatttacttctaaataaatttatttgcaagtttactacctgcaaatagcctctagaatgtagacaataaaacatagtaaaatgattaggaagtgacaaattttgaatatttgttttttaaaaaatataaaagaggtataattgacaatgcaaactgcacatatttttaaatgtacattttgatattttgatacacgcttatacccttaaaatcaaaaatttcattgaaaacaagtgaaaagacaatctgtaatactgttaacagttaacagttaagttattctgttaaatacatcagttgtccaaaaaacaaagtaggcaacatatttgaaatacaggcagttcttgctctattcatcttcatgaactgaaaatgccttgacaaaacatgagaaagaatggaagttaacaattgagatgaaatttgccaacatttattttggaatcaaagtctattttcattatgaatcctctgggattttgtaacataaagttttctagtgcaaatacattgggatttattaggatttactgataaagaactctcagtcacattttagttgtccatattatatatttggtacattctgtgataacggaaagtacaaatagcactaatgttttggggaagaaaatagctacttgttgcctccttcccacagaaccagggctagataatgaggagcacatctcactaactgatcacacagctgtctgtagacatttggccaggaagagcactgtgggatgaatcaaacaaccaggaaatcaggtggaggagaatcagaagagatgctactgtttgttttcaagtaaatcaggctatctccagaaggatcatcaatcatagataagtgtttacttctagtgttacacaggtagaacagaaagtatgttaaatttatatgtatttgaaagaaaaatttaagcatgaagtaaaaactgaaggaacattctagaaaagttttagtacacaaaataagagaatgtaattaaacggtatttcactgtagatttctgctactttggtctcacccattaaatcccctatacctcacatagttgacatgaacaaagccattcattattccactggcaaatactttcctgttatatatgttctattcattacctattccaacagcctctcatacacattcaccttcgaaggtgatttcaacagttctcagctgggcgcagtggctcacgcctgtaatcccagcactttgggaggccgaggtgggcagatcacttgaggtgcacatcatctggtgtgcttagcattactccatttctgatactgttagaaggcaacttctaactttgtcagctccaaccaatcccaagctggccaagcacctattgggtctcttttgctcctggaggcaacatagtctccatttacaaataccactcaggcctatttattcacccatccacaaaacagcccacttttggaggcctttacaacagaaggccctagagtcagttcagatgaccatataacagacatttcctttagtgcctcctggagattccttcatggtggactacccactagactctcttcttagactctggaccacacatctggccataagctgcccatgggcttctggtgcaaaaaactgcctgttttgtcctcatgtaacatgcaattagagcaacaactgccagctacatactgggacctcttagaaacagaagctctcacaggacctgaaccatggcacactccacccagttacacattattacctgggtcatgaaagcaacacctacaagctcagcctgatcaccaaggccttgatacaggatggagccaaacctgggccccctggtgtatctcacttggaaaaagaggtggccttctctgtcctcagtctcttgccagatgccatggtgaaggaagtctcctctctcctgggcccttggcagccctggaatcaagtaagtaaacaacaaggggagaacacatactttgttgacagtaatgccaccactacatgagctggagctctctggaggtctgctgcttttcttctaaacaagacacactgctgaaggatgggaactgcaggcagtcattttagcgctggaggctaccttggccaagaaattacctcaattacacttctagtcatttggtgcaaccaatggcaacaatttctcgttcaagatcatactcttggggtaaacaacttcaggaatttcttgcctctcagatatcaaagatataaattaagatcatgtatgtctccgcccacaccaaggctcagactgctgaagcctaacttaattcccaagctggtagattacaacaattttcaaaaactaggaccaaaactttgttggatgaccttccaggcccattcctttatttttggcccaataggcccatgaaacaacagtcatagaggaacctctatgaggaacccaatcttgaagactggggctaaacacaaagtgtttccccacccctctaccatggccaacatgatgacgggtcagtgcactctgtgggaatacctgtcattggcaagacaactgaggtgtgctattctggatcccacttttagtcatgtggcaggtagattttaccaggccactgcctctgtctaccagtgccacttgttatgctttgactgtggttgatgcctaccgccgacatcttactttaccccactagacatggcactgctgaagctactatacagcaccacaaaacgctcctattccctttggagttcccgacaacagcggtgaacaaagctctcattttagacaaagcatttgagagaacttgcgacattccaatcagtcccaggctgctggttttatagaatgccacaatggcttacttaaaacttagtagaaattatgaaatagcatatggtcttatagatgggtctttttcctgccattagaccttattatactaaattcccagctctattccctgccaaaatgcactgaaaacatctccattagatttcattgccctctgtggtgacacttcacataacagagcttacaaagatcatattgaactaggcattcctcctgttcttcctctttctgctatcacttttcagtccccatcctgactggaaagaaagacagactgagggtggattgtgagttatgatcctcatgaatgaatgcccctttggcttcctgccagagccatctggcaccctgctaacgttgagtcgcctaaggcaggagttttgccaaatattcttggttataaaggatacttaattacaaatgcccataatgatctcactcaggaaagagaaatcatggctccaagacccacaaccacaccgtgtcaataacaggccagcaaagaccaaaactgaatttgtctaacagcatcctccactaaggaacgcaggctccccctacctcattggcagttttgtacacctgtgtgtgtgtgcgccgtaggctccctttcaactgcctcaccatgtcacagcttattcagctgactgtaagccttaccatggcactctccacacactctccacacataatctatttggctggtcacacctcaaacctaaacttgttctcctggacttctcttaaaaatgccaactccagttattcaagatgacccactattatgtctgaccaaaatgttcactggcaataattcataccaaataccaagtccaagactttagcccctgagaacttattggttgtatttcccgaaatacccctcgcttctgaagttattgagtccttaatctcagacttctcttaatttgacttgcactatgtgcattttggggccaaatataaccttttgttatcctgccaaaaaaagttctgtattttgattgtgatggtgattacatgtatctccacacgtgataaaattgcatagaactggccagaagtggtggctcatgcctgtaatcccagcactttgggaggccaaggctggcagatcacgaggtcaggagtttgagaccagcctggttaacacagcgaaaccctgtctctactaaatatacaaaaattagctgggcatggccgggcccagtggctcacgcctgtaatcccagcactttgggaggctgaggcgggtggatcacgaggccagtagatcaagaccatcctggctatcacggtgaaaccccatctctactaaaaatacaaaaaattagccgggtatggtggcgggcgcctgtagtcccagctactcaggaggctgaggcaggagaatggtgtgaacccaggaggcagagcttgcagtaagctgagatcatgccactgcactccagcctgggtgacagagcgacactctgtctcaaaaaaaaaattagccaggcatggtggcgcgcacttgtagtcccagctactcaggaggctgaggcaggagaatcgcttgaacccaggaaatgcaggttgcagtgagccaagatcaccccatggcactccagcctgggtgacagagcgagactctgtctcaaaaaaaaaaaaaaaaaaagcatagaactacacacatacaacgagtgtataaaatggtgagctctgaaagaggtctgaggattgaaccaatgtcgcattcctggttttggtaatgtactaaggttatataagatgttactattggggaaagtaggtgaaaggtactctgcactattgatatggtttggatatctgtcctgcccaaacctcatgttgaaatgtaatctccaatgttggaggtggggcctggcaggaggtgattggctcatgagggtggtttcccctgaatggtttagcaccaccctttggtgctgtcctcacgatagtgagttatcatgagatctggctgtttgaaagtgtgtggcacctccaacttcgctcttgctcctgatcccacaactacatttgcaacatcctgcatatctgtacttcaaaataaattcttaaaaatttttcactgttccgtatatttccacagtgtatatagttcactgttctgtatatttctacatcagaatgtataattttcggccgggtgtggtggttcacgcctgtaatcccagcactttgggaggccgaggtgggtggatcacctgaggtcaggagttcgagaccaaactgaccagcatggtgaaaccccctctctaccaaaaatacaaaaattagctgggtgtggtggcgggcacctgtaatcccagctactcagaagggttaggttactcaccactatactaatgaggatgaagcctctttttttttttttttttgagatggagtcttgctcttgttgcccaggctggaatgcagtggtgcgatctcgactcactgcaacctctgcctcctgggttcaagcgattctcctgcctcagcctcctgagtaactgggattacaggcgcctgccaccacccctggctaatttttgtacttttagtagagacaaggttttgctatgttggccaggctggtctcgaactcctggcctcaggtgatctgcccccctcggcctcccaaagtgctgggattactagtgtgagccacgatgcccagccaaagtctcttttttataagggccttaatcatactcttaagggaggagctgtcataacaacctaatcaccttctaaaggccctatctcttaatctcataataccattgcattagaaattaagttttaacatgaatttccaccagcctcaggggctcacaccggtaatcccaccactttgagaggcagaggcgagtggatcacttaagcccagcctggccaacatggtgaaaccctgtctctactaaaaatacaaaaattagccaggcatggtggcagacacctgtaattccagctgcctatgaggctgagatgggagaatcacttgaacctgggaggtggaggttgcagtgagctaagatcacaccactgtactccagccagggggacagagtgagactccatctcaataaataaataaataaagataatgttagcccaaacggtgccatttcataaaccctggacagagtggaaaattccactaggtctttggctgtgagaaacatcctgccagacgagtcccaagcctaaccacctgactgcaggaaatccctcccttatcagcagctaaccacaacgccccaccccagtctacaacaagcccagacctctcccgcctagacctataattaccccaatctgtaagcaggggtggactccagcgctagctggtgtccccgtctacaggcctttgttcaataaacctgtgttgccatagagccatctccattccgttccttctcccttccttgctctcagttctgaaacccgggacgacgcttgggttcacttggaggaatccctttttgcaacctgggaagcagtgagcagcggcagctcatcccaggtgaattcccagatcctaattagacccttcactcccagccccgtcttcctaccactttcccttttctctccttcttccactaggaggctccagcaaggatcactccaattactggacatcatatccaacaccagtctccgatttctgggtgagttccccctttccccctctggattcctctcatatttccagaaaagcccagtgccaggtgagagaactccccagtcaccactgggtaaccctgacctgccttctcaggggatgtcctcagaatgctcactgctccaacccccaagggactgtgaaaagcttcagggatgccccagctcttctccatccctcctcatgattggaatcaggatactcaccaccccacacacctatctcaccctcctggccaccaatatggggcagggctcctaaaaaccccctcaagacacccctctcagatactcatccagaacctcaaaaccctgggcttggtgcactccattaaaaccaaatgccttattttcctttgtaatgtggcttggccccaatataagctggacaatgatagttgatggccggaaaacaggacattgaacttccaaattcaacgtgatctaaaaagctttctccaatgcaatggtaaatcgtccggggtgccctatattcaggcctttgtttatctctgtttgtggtcctctctctgtcaatcctgttcaccctttcaaatcctcctcttcaacaaaagacccacgaaaacacctcctctttcggacaagccttcctcctccgattttgacccagtcgatgaacctctgcccttgaacccctcctcaccaccatatcctcctccttctcctttggttccatctccccctctggctcctccacccccttaccatcatcctccattctcccttctttctccactgcatacacagtcctgtgcctaacaccctcccgctgaaggccatgcccacatccaaaaccctttcagagtccttcccttgtgggagacggcaggggctgaaggcatagtctgagtccatgttcccttttccctagctgacctcttccaaattgaaaagagactcagctctttttccacagaccctgcctccttctgtaagagatttttgtacatcactcaatcttatgacctaatctggcatgacctttatgtcatcctctcctcccctcttacccctgaggacaggggacatgtctggacagctgctcaggctcacactgatgctctccaccaccaagatgcagctcataacccagttggggccttcgttgtccccagaactgatcccagtgggattatcagccaacttccccagacaggtaaaggcaagatcataagataacatgcctcctggcaggcatgaataaagccactcttaaggtagtcaactatgaaaagataaaggaaattattcaaggccttgatgaaaatcctgctcttaaccagcctgatcaacatggtgaaaccctgcctctactaaaaaattagccgggcatggtggtacgcctctgtaatcccagccactcaggaggctgaggcaggagaatcacttgaacctggtaggtggaggttgcagtgagctgagatcactccactgcaatccagcctgggtgacagagcgagactccatctcaaagaaaaaaaaaaaaaaaaaggaaagaaaatcctgctctttttctttctcgcctttcagaagccatgattaaatacaccacctaaagccctcaggccaacaagggcagaatctatctccacttacatttcatttcccagtcaacccctgatattcagaaaaaaactccaaagactggaagatggccctcaaaatctccagagacttaatcaaagtggccttcaaagtctttaacaatagggaggaagaaccgaaaacccaaaagttcaaaaggtactaggctaaataccaggtgctggcagatgccatacaacagggttcccaatgcatacaaaaatcctcaacctcaggacagccctcaccaggagcctgttttaagtgcagccaacagggtcattgggcaaaagcctgccctaatcccaggctgccctcaaaaccttgccccatctgtggtatcaagggacactggaagtcagactgtgctcagcaagacgcttcatcctgcttgaccacctctaactcaaacaggtcccccattccagatcccagtctggcaagcattcttggcctggccactgaagactgacaggatcacccactaccatcaccaccttagaacgcagggtaacactgtcagtctctggtaagctcatgtctttcctgttggatactgggcaacatactcagttctaccagaatattctggacctctcctcagttcttccatcactattttaggagttgatggaataccctctaaacataaacagactggccccctattatgtaacctagtcaacacttgcttcacccactcattcctggtcatccctcaatgtcccacccctattttgggactgaatatattaatcaattccagttttccatagaatttaccccctgtcattctaccccttttattttactctgtcaactggacacttccctctcctctccctcatcttccttatccaatttgctagcctctgtcaaccccaaggtttgcgatgtttccaagccaacaatagcagcataccacaccccagacaaaataacctttcaaaacccttctacattcctttgtcagcccagtacctccttagcccagctggcctcagagacctcaaactcattcgttggaaattcctgcaagcccaaattctcaagcctgttaaatctctccacaacacccctatcctggccatctggaaagctgatgggtccaactacctggattttttatttattaaccaggcagtggtgcccatccatctggtggcccccaatccctacactttactttcccatatccccccacctccaccactcatttatctgtattggacttgaaggacaccttttttcaccatccccttggatccagcctcccaaagcctttttgctttcacctggacagatcctgatactcacacatccgcacagctaacatggactatattcccacaggggggctggaatagcccctgcttatttggacaggccctcaccagggacctggctaaacttccccttgctcctagcaccctcctccaatacatcaataacacccttctctgtagcccctcccttaacctatctatccatccaacacatcattcagcttctaaactttctccattcttggggatattaggtctcactcacaaaggctcaagtaacccaaccccaggttacctaccttggacttatcctaatccctaatattcaggccataccaacccaatggaagaagctaatccgggatatgcccctttctcatacaaagaacctcctttccttcttgagccttgtgggatacttctggctatggattcccaacttgctgaccaagctgctgtacaccacatcacgtgggcccatcctagaacacctggatccagtctgtaccattgactcccagttcaaaaaactgaaaaatgccctttcaatgtcgccagcactgggactacccaaccccaacaagccctttactctgtatgttcattctaaccaaggccttgttcttgggctactctgtcaaacattcagcggtaccccacaagccattgtatatctctcaaaacaactgaactcagtcatctaaggttggccaccctgtttaaggatcttatgtgtgtctatgctgctggcctcagaagctcaaaaactcaccctctatcaatacattaccattgcaccttctcataacctacaggaactcatgagtcattgctcccttctttccctcctgctatcttacttacaacaaacacacacctcctacataaacaaccttctaatcacctaccaaagatgtaaagttctcaacccagccaccctcttccctataaggacctttgactctgaactctgtcactcctgcttggactttttagattccctttccttccctttccgacacatatcagagacccccttacaggggacacctacatggttcattgatgggagctcctttaaagagccatgtcttgcagcaggctacaccatcgttgccaaacacaagctcctagagtccaatactgtcgcatcccctaccacctcctaacaggcagaattagtcgacctaactagggccctcaccctagcaataggaaaaagggtcaatatttacactaactgtaagtatgcataccacattctacactcccaagccttaatctcacaggaaagagcttttcttagtaccaaagggacctgcatagtaaatggcaaactgatacacaggttgctggaggtagctaaactaccattagaggccaccattatccattgcaatggacaccagagagctacagatgccataaccaagggaaacattatggcagactcagcagcctggcaggtggcccacaacatcccatcactgttgtccattttcccagcagacatccctcatacacccaggaggaacaagtcaaactaacactggggctacccaaagggaaggctgatgttatcttgacacaaactcatcctgcccaaatctcaagaactctctattccctcccacatccacaaccacttccatgctggttattaccacataccccagtttttaaaaacttacacacactccaccaccatgacaaccaaccttgaatgtttaaccagtctgcccagtttgtggtcagacttcccctgaaggggctcttaaaccacctcctttctccactcatcaggcatgaggccatttcccagaacaggactggcaagttgacttcacccatataccccctgtaaaaaaaggaaagggccaactacagcctgggaaaaatatttgtgaaacctctatctaataaatgatgagtattcagaatacgtaaaacatccctacaaatagcataaacaacacaatttaaaaataggcaaaagttcaagaccagcctgggcaacatggcaaaacactgtttctacaaaaattagctaataagctgggcatggtggtgtgtgcctgtggccccagctacttgggaggctgagatggaaggatcactgattccagggaggtcgaagcttcagtgagctatgatcaaatcactgcactccagcctgggcaacagggtgagatatcatagctgtaattccaacgctttggggggctgaggaaggcggatcacttgaggacaggagttcaacatcagcctggccaacatggtgaaacctcgtctctagtaaaaatacaaaaattatccgggagtgtccaggagtggtggcaggcacctgtaatcccagctactcaagaggctgaggcaggagaattgcttgaacccgggaggcagaggttgcagtcagctgagatcgcgccactgtactccagcctgggcaacaagagtgaaactccgtctgccctccgtctgtctgcaacagagctagactccatgtcaaaaaaaaaaaaaaggcaaaatatttgaacacatttttcactaaagatgatatatgaatggtatataaatgcatgaaaataagttcagaattattactatttaaggaactacaaatgaaaaccacaatgagataccactacatactcattttgatgagtaacattaaccgaatgatcacacctagctgttgaaggtatgaaataaactggagctctcatacattgctggtggaaatgcaaaataaataaatttggaaaacactgtagccgttattaaagttagttgtccacttatcatttgataaattaatctcattcctaagtataacctcaagagatggaaacgtgtccatagaaatacttgtataatcattcctcagtatccatgggggactgattccaggacccccaaggataccaaaacctgaagatgttctagtctcttatataatatgatgtggtatttgcatataacctgtgtatatcctcccacataatttaaattataatttaaattacttataatacctaatacaatgcaaatgctgtttaaatagttgctatacattgtcacctaatacagtgtaaatgctgtttaaatagctgctacacaatagttgtattgtttagggagtaatgacccaaaaaaggtctgtgcatgttcagtacagatgcaatttttcttccaaatattcaatttgcagtgggttgaatctatagatgcagaacccatggatatagaaagccaactgattttgcgtgttatcaacaattttcttcaaagctaaagactggaaaacaaaaacaaatgtctatgcacatctgaatgggtaactgtgttacatttataaatagaatattcctcataaatgtcaaggagggaaaaaaacattaatctgaatctcaaaagcacaagtgaaggaaccaaactcagaggtctatacagagtaaaatttctttcagataaaaatctagaaatggtaaaactcaagtggcaaaatgcaaatgagtgatcctcagatctgggcctaggaggaaggggcggactgcaaagggcagaagagtacatagggtgaggagaaccttctctatcaggattgtggtagtggttacatgctgtttatatttgtcagcactcatcaaattatacactggaaattggggatcatcctatttgtattatactgcactaaatttgtttaaggaaaataataatacacaccaaaaatattcacggctcaagaagtaatatacttcctgccgggtgcagtggctcaggcctgtaatcccagcactttgggaggccgaggcaggtagatcacctgagatcaggagttcaagactagcttggccaacatggcgaaaccccgtccctactaaaaaggcaaaaattagctaggcatggtggcacgtgcctgtaatcccagctacttgggaggctgaggcaggagaatcacttgaacccagaagacagaagttgcagtgtaccaatatcatgccattgcactccagcctgggcagcagagtgagactgtgtctcaaaaaaaaaaaaaaaaaaaagaagtaatatattcccaaattgctctcaaaaatactcttccttaatcttataaagaacatctgcaaaatcctagagtaaatacaataactcatggtccattattaaaatattttcgggaccagaaaccaaaggaggatggtcactgtctgcacatatagtcaattatattgaaagtcctgtctcatgcaattaggtgagacaagaaatatataatctgtaaagaagaaagaaagctaagttcctcgcccccttaaaatatatcttaaatgtcattttcactgtaagtcctactatgaacacctgatttactgtttcaccccatccttaccaactttacttctcagctgtatcctgctctataggacccatcattttctaatacactatcagccgaataacatgggtgctttgcttactgcttactgtctgtttctatcaactaagtctaagttccatgtaggcaattttctttttaattttgtgtgttgatataccccatataatgaaaaaatgacctgacccacaaaaaatatgcaataattttttttgaggggcagagccttgctatgttgtccaggctggagttcagtggcatgatcacagctaacagcagcctcgaactctcaaaactcttgggttcaaaggatcctcctgcttctgcctcccaaagtgctggtattgcaagtgggagccgctgcacctggtctcaataaatagtttttgaaacactgaagaaatatgacataccaatttcctattcatttttacctctccagaaattctgtctaattcattcactgtctctaccttcaagttacctttgttctatgggatgactaaaaaactcacacacagctctatattctgctaccaaaaccttcaaagcggccaggaatccagcagagccatattctcaccttcattctctttctccttagatcttgctgtcctctgcttacctaccctacagatcaattttatttttactttttcattttttcctacatagggtgctcctcagctacttctgtcattcctattagatatctttatgattcaccattaatagtttcagtaatatacacaatactcaaatgttcttcgcaaataacctccattctccttacagatggtcgctgcaattacaggtgaagtgataaccacttcccagcaaaaaggtgagatcagggagttccaaatctttatctcaggttcagatgtcctttccacacctgtacagatgccgtcactccatcattctgacaccagatgccaagtgagtaactcatgcttttcaagtaagtttcaggtccttagatggaaactatctcagaaaattcagtattaattgttctctgtaaaacatttctgggtttggaacacgaaagagtttatatagcaggaaggtcatttgctgagaaaactagacacacatagcatcctgtctatatgccacagataaagacttgatgctacagacatgttaagaacagttagatgacaatggtaagctcttggtactgtgcagatacctggtgtctgtgagagaggtgctgatatgtgcatttcttctgtgaaacagcaggttgtgcaaactggaatctgtaatgtctccacattctgtcatcagcagaagactctgaacatttttctaccgtttaaatgagtctcaattatccaatttataataatgcaaattttacttacagataaatatgggggagtagaggagggttgtgagtttcagccatgaaaaattcatggagcttaaaaattcctaagtatctcaccctgcaaacagataattatatttctaaaagtgtcttgacattctcattctcatgtactcacagtactcttctctatcctcaaagtttctgaattgcttctctgttcctgtctcctctgttattctgcctccctcctcccttccttgcctagtttaagtggatttttagcaaacaaaagtgttgactagaggctgtgagtgaagggcatttttacctcccctggcccccagtgtagattcctcttctgtctacacagaatccttcagatcaggataaaattgagccttccttactagttactacgatttttgaagaattggtgtgattgataaccacagcaacagtgtttggactttagagaaactttattcatgcccacactatgtctactgacctacattttgttacttaaattcattttaagatttctcttccaaaagttttccagttattctcctcttttgattcattgatcccctatatttttattttaccagtaatttcataacttctcttaatattaaaatattttaatgaatatttggaataaacgtatgtgtctatggtgaatactcactgggacacactatacccctccttcttccacaacctcaacctaaggaaggaacactgtctacaagtggtgaggatccttccagatagatttccattaatttacataaattttgcaagatctcccttaactcacctctgcttgacttactgctgagtaaattctttctccatattcccttcatgtaacgtgctaatcagtgaccataaatcacacatgattgttactggtagaatcaatgctttcaactccaacacgtctgtctccacaggttgatgtatatatttatcaacagggagttttctcctcccaaaagtaatgccatttgctctatttattcaatggcataagtggtttactgtaataaaaactactaaactataatcacaaaaaggaaaactttttatttttataaagcctaaataaaatgtgccagaaacaaaaattagagattctttaaaaatgctattgaggtaaaagtgagtgataaaagtagacctgtataaatacaagtctgtgaatattctgtactcagaattttgacatctttaagtgttttagcttactttaaagaactaccatgctgggcgcggtggctcacgcctgtaaccccagcactttgggaggctgaggtgggcagaaaatctgaggtcaggagttcaagaccagcctggccaacatgataaaacccgtctctactaaaaataaaaaaattagctggatgtggtggtgcacgcctgtagtcccagctactcaggaggctgaggcaggggaatcacttgaacctggaaggcagaggctgcagtgagctgagattgcaccactacactccagcctggccaacagagcgagactctgtctcaaaaaaaaaaaaaggaaaagaaaaaaagaactgccaattgtaaatttgtaaatcatgtttaattatagtttatgatagaaaataaaagaaacataaaatttcttacagaagaatttaacccataacaaagtttgagcaaagtaatacaagctacaattaaaataagtcatttcaatttcatttgaatgtgagccaaacattttatgtttttatttttttctcaggattatatctttttatatgttgtatttttttcttttatctggctattaacaatagtaaagtgattgataactttctcttttacattctatgtatttaaatatcttatttagattattttaatttgcaattatttttcattaatatttcattttattaaaaattgccttttttcagtgtttacatattaatggcttacttatccaagattgtaaaaatatacaaatatttttaccgctgagagatttggttttttgtttgtctgtttttgttttttgagagggagtctcactctattgcccagactggagtgcagtggcacaatgtcagctcactgcagcctcctcctcctggttcaagtgattctcctgcctcagcctcccatgaaactgggactacaggcttgagccaccacgcccagctaattttcgtatttttaatagagatgggtttcaccatgttggccaggctggtcttgaactactgacctcaagtgatccacctgccttggcctcccaaagtgttgagattacaggcgtgagtcactacacccagcctaagactattctttactttgggttttttgttgttgttgttgtttaacaggctgtcatttgtcacccaggctggagtagagtggcacgatctcagctcactgcagcctcaacctcctgggttcaagagatcctcctgcctcagccccttttctgcccctcaccccccacccccaatagctggaactacggacgtaccaccacttccagctaatttttgtactttttgtagagactggatttcatcatgtttcccaggctgtctccaactcctgaaatcaagtgatccgcccgcctcggcctcccacagtgctgggattacaggtgtgagccaccgcacccgggattgttattcttcactttgaatcccacatgttatttaaagctaagacctgaggcaaaaaaaaatcacttctatatttcaactaatactattttattactaggtaataagtcccaatatttacatttatgtacacatacacacacatttcctttctataccattaagataatggtagacctttatgtcaggaaaatgctataggctgggggcgagtggctcacgcctgtaatcccagcactttgggaggccgaggcgggaggatcacttgagcctaggagttcgaggccagtctgcacaacgtggtaaaaccatgtctctaaaaaaaaaaaaaaaaaaaaaaaaaaattagctgggcgtggtatcatgagcctgtaatcccagctactttcagctactcgggaggctgaggtgggaggatttcttgagcctgggaggcaaaggttgcagtgagcccagatcccaccactgtactgcagcctgggtgacaagagtgacaacctgtctcaaaaaaaaaaaaaaaaaaaagctattggtaattgaatttatctttattgaacaaatcctcttcattgcatgctttaaattttgatttgtttaaattttattgaattgtaataaaacgattttgaaattactagagaagcccaggcgctgtggctcacgcctgtaatcccaccactgtgggaggccaaggcaggcggatcacctgatgtcaagagttcgagaccagcctgaccaacatggtgaaaccccgtctctactaaaaacaccaaaaaacaattagccgggctagctgaaggcacctgtagtcccagctactcaggaggctgaggcaggagaatggcttgaacccgggaggcggaggttgcagtaagcagagatcgtgccattgcagtacagcctgggcgacagagagagtctccgtcaaaaaagaaaaagaagagaaaagaaaaagagaaaggaaggaagggaggaagggaggaagggaggacgagaggaagggaggaagggagggagggaaaagaaattcctgggcagatgaaagtgaggggtcgggggtcggggtcgggcgcggcgatgccgcagctgcggggctcggtggactcggcgagcaagagccccaggacgctgctggcggcgggcgaggagctggggcgcggcgcggggcggctctaggcgctgtggccgctcagcgtctgggacccagcgccgcccaggtcagggaatccttggtgttcccgccccgcagcacccggggcgggggaggagtcggcgcggtcgtgcggccgtggaggacagcgagacccggggctgcggctgcaggccgaggggcccctgggacagtgagaagcagcggcgggagctagtcacggggcagggagcgctcagcggtaaagacggcttcatctgactccagggctggcaggcggcccggatggcatgccgtctcctgcggagaattccaatttccccctaaatcgctcaacaagcgagaaggttttgggattcgaattcagtggggcaagcgaagtcgcctttccttcttaaacagatggaatccctggtccacaaacgtaccctgtgccaatttcatacaacacgctatggctgctgcggatgagaacacagcaactctgccagatgaaaagcttcaaggctctgtgaatccaaggtcaaaaacgccaaaaaggaaagtccttttccaggacaagcgcacgcgtgctggtcgtggagcgccccctcctcatggagaccggcctgggattgatgtccttcattaacaatgaggctaaactgggctattccatgactgaccaggggcaaaataggcttttagccagcggcattctgggagctctccccactaagaaggccaagggatgtggggtctgagagcctggcagtcctcatgcaaagccgctgctggctggaagcataggggtcttttaccttttgggatctctgcacgattagaatagtaaagtggatagtaattgcatattgcactctgctaatgcaagctacagacaaaagcaaaaagaatctagctgccactgtgctgctaggattccattttctgtaacttcagttctgatacttttcctggagtgtatctacttggcttctggcggttcttcccatcccagccactccagcaggctaaatcccgcagcacaccccttaccatttgtgtaggctgctaaatacagggaggcacctggtatctccagtgtctgcagacacaaatatgtttacacttggtgtcaaattttgtattttaaattttaatacttttttttttaaagctcatacaaaagcagccagcagacaagttcactgacatcagtctgcacctgtcagctcctgggtgaatcattgttcttttgtaaatgtgtgtttgacctaaagtcaccctttttctaaaattaatccaaggccgggcgcggtggctcactcctgtaatcccaacactttgggaggctgaggcgggtggatcaccagatcaggagttcgagaccagcctgaccaaaatggagaaaccccatctctactaaaaatacaaaataagctgggcagcccacgtcagtaatcccagctactccggaggctgaggcaggagaattgcttgaacccgggaggtggaggttgtggtaaaccgagatcgtgccactgcactccagcctgggcaacaagagtgaaactccgtctcaataataatactgatacttaaaatatctttgcgaggcccaagtaggtttacagaaaatcatcttaggacaattttttaatttgagaaagtcactttggcagttctttgcacacaattttgacaagtgtatgtattataagttgtattgtattcatatttaaaaggaaattgggtagtttgccttttgaagaatgcgctttttaaaaaggaaccatatcagatccttatgaagcagccgatgcctgccatggttcctacaggtcctgtacagactcggggctttgtccaagtctccactaaacatgctaagcttcgatgcgccctggagaatttccacggggtgatccacgcacctccatgagatcctgcagcttgcttgtatgactggaagcattggataagcttcgcgtgctggctctccagttctttccttctctttacgactgttgtagcttttagctaatggagtggtgcggtccaagtgcggccacctacgggaggtgcagggctgcctcggaagctggcaggggaccccagtctttgcgttcataaagacatttagaaccggatgaatgttgttccttttttgaagttgttattaaagtaggtgcaacaaccaaaaatcaataaataataaataaattgactaaatattttttctcaaaaaaaaaaaaaaaagaaaagaaagtcaccaggtgtggtggctcacgcctgtaatcccagcacctggggaggctgaggtgggcggatcacctgagatcaggagtttgagactatcctggccaacatggtgaaaccccgtctctactaaaatacaaaaattagccgggtgtggtggcgcatgcctttaatcacagctactctgggtgcggaagttgcagtgagccaagatcgtgccactgcactccagcctgggcgacagagcaagactttgtctcgaaaaaaatagaaagttaacagttttgtttattttcctaccaggtttttattattattattattattctaattgaaatcactgtttcctacatactgaggcggattggctttgtcttcttggaaacaaaggttattttcctcactcacactggagcggggatactcaccagacacaagttgagatgatgctggatgtaaacgggtcatctatttttaccaaaggcagcactacctgccttcccaattgatcagaaaagcatttgatagttgtctttgtaatatccttatttgattaaattactatgtggatttcacatttatttttattgttttgtgcctgtttattctatgcctaagttggggtatcaccaggtcatttcctccaccatctgtgtttccccaaggataaatcctcctgctcatgcccttcactcctccattagcccattccctagaaagctgctggttttacacagtggctgtgtgtctttgccttcttaatgtagcattcagagtcccactctggagccaggtatcaaatcctagcccagccacttacaggctatgtagcactggccaaggtactgaacttctctgtgcctctgttattttgatgttaaaatggagttatttaggatctactttacaggactgttgtgatggaaatgggttaacatacagaaagcactgagaacagagtcaaatatgccctgactgcttaaaggttagttattatgatccctgatgctattactactcttactgatatcatcgtgcctcaggtctaactgctcccagagttacacaccagcatgtccaacagctggctgtatatctgaactcaaaaatccaataacctcctccaaacagaaattgccagcttttccccaaaccttttccttacagctccttacagagctcaaggaactccttgagactgcagaagcagacaggaaatgctttcaacccaccacaaattaacaactggcctccagtggtactcacattgtctacatttttcattgttttttttttgtttgttttttgtttgtttgtttgtttgtttttgagacagagtctcactctgtcgcccaggctggagagcagtggtgcgatcttggctcactgcaacctcggcctcccaggttcaagtgattctcctgcctcaggctcccgagtacttgggattacaggtgcctgccaccatgcctggctaatttttgtatttttttagtagagacgaggtttcatcatgttggccaggctggtctcaaactcctgacctcaggtgatccacccgcctcggcctcccaaagtgctgggattacaggcatgagccactgcgcccagcccatttttcattgttgtagcagagaagtatccctgcttccatcaagagccaattttcctgtcacagttggtttaatgacatagttggtgacaggacctaaaccaccagtggaaaattggctcttgatgggagcagggatacttctctgtatggagtatatgtggatgaaactccttggagaaatggactagtacacagtcttataatgtgaggattcagaacataattcctaatgtggggaagtcaagcagacatttcatcagtggagtaccaggagattcaaactctgtacccaacagtgatagggggacaatctaagccccaagaggctgcatgcctgatggagcagatgaaacacatggctgtaattagctcccaccccttcgatacgttctcaactccaccaaagcctcagcctgtatgagggtggaaagtggggagggagagtgcagggaagaaggcacagcttccaccacactaggtgaccaggcgcttctcaccattttaactcctccatctctctcaagcctcatgttaagtctatcaaacatcatatgctttctcaatataaaatatgcaccaatttctccctttccactgatataatcctagtctcaacccctgtcatctttttgatggattaggaatgccttctctgggtcccgggccccctctgtttcaccagcctggaattggcacaggagtcacagcattagccttgccctctgccacccttgtaattcataaatctctgaaaacttaaaagtttgagcaaaagtttgtcatgtttctatgagtaatttataataaaacttgatcagaatttgtgagactaacgtttgtctttatattttccttttttttttttttttttttgagacacagtctcgctctgtcgtccaggctggagtgccgtggcgtaatctcggctcactgcaacctctgcctcctggattcaaacaattcttctgcctcagcctcctgagtagctgggattacaggtgcatgctaccacgcccagataatttttgtatttttaatagaaaccgggtttaaccatgttggtcaggctggtctcaaactcctgacctcatgatccacctgcctcggcctcccaaagtgctgggattacaggcgcgagccaccacacccagcctgtctttatattttcatttaatgtggaccttgttacattttaccgcagattttgtatttttgtgtgtgtttgtttgtttgttggtttttgagacagtctacctctgtcgcccaggctgcagtgcagtggcacaatttcagctcactgcaacctccgcctctgtggttcaaacaattcttctgctcagcctcctgaatagctgggactacaggcacgcgccactacgcctggctaatttttgcatttttagtagagatggggtttcaccatattggccaggctggtctcgaactcttgacctcgtgatccgcccacctcggcctccaaaagtgctgggattacaggcatggttttttttttgttcgttttgttttgttttttttttagagacttggtctccttccatttcccaggccagagttcagtagggcggtcataatccactgtagccatgaactccctggctcaaacaagctacacagacatgccaccatgcctggctaacatttttaacattatttttggtagagacagggtcttgctttgttgctcaggctagggattcacagagtcttgctctgtctcccaggctggaatgcagtggcgcaatcttggctcactctagcctctgcctcccaggttcaagtaattctcctgcctcagcctcccaagtagctgggattacaggtgcccaccaccatgcccggctaatttttgtatttttagtagagaaagggtttcaccatgttggccaggctggtcttgaactcctgatctcaggtgatctgcctgcctcagcctcccaaagtgctgagattacaggtgtgagccactgcacctagcctgcagaaatattaatgtgtttgtttatgacctgttgacccaggaccagtgatggtatagaacactgtattagagacatggagctggggctggatgaagattccatcagtaattcaatcaacagacaagtgttatccaatcacgtctttaaatcaatcactgacatggagctggggctggatgaagattccatcagtaattcaatcaacagacaagtgttatccaatcacgtctttaaatcaatcactgatcccagcccctataaaagggagcagccttaggaggcacatcagataaacccagtgtggaaagctagtcacacatcagctcagtgttcggcccgggattacccagtcaaccaaggaggtaagcttccataatggaaggaaaattttgtgcctttgagtgtgtatacattttgtgtctttgagtgtgtatacataattttgtgtctttgagtgtgtatacatgtgtatgtaggcatagctatttcaggaaaattcctaactacagagatatgggggtctcccaggtgtagggaatggtcttttgttacaacagctctgacccaaaagggcttgatgttgtgaactctgtataaaggcctggtgtgactgaagatttttcttcaaaaagtctatcgtatgactttatgttctagtaattcttttttttttttcgagacaagatctctatcacccaggctaaagtttagtagccccaatcacagctcactgcagcttcagcctccccaggctcaagtgatccttccaccttagcttcctgagcagctgggaccacaggcgcacaccaccacaccaggttaatttttctattttttgtagaggcaggattttgccatgttgcccagtgtggtctcaaactcctggcctccagtgatttgcccactttcagcctccaaaagtgctgggattacagatgtgagccactgtgcccagcttagtaattcctttgtattgcattatatgaaatatgtagctgggtgtcattagagatcataaagcccaggatacagacccagacctgacgggtagcatgcctgcgtcacagtttgtaattgccagactccagattagagctccggtagccttgttttgaattcccaggttctgggaaataagccataatactttgcagtcttgtctatgtgggacggagtgcatgtctccaagtgtgaacatgtggtctgtgtgtcataggggagaaagggtgggtaatccaaaaagagaacttggagggaagtgaaatgaaggggaagccatgggttccacaggaaaaaaaaaaaaaaagagagagagagagaccaatgtccctggatatagagaaccagccacaacacctaagatggagcttgagaagtgtagagctggcccaggaaagcctcgtaggacaaggactcagtgcttttccctgagggcaaaggggagccatccagagagtagagtggggtatgatgtgagcagattagcattttataaacgttgactggaagcattatgacaactgggttagggaaaggcaagaatgtgttccattgtctcctaggagattttaccaggatcacctctgccttattaactgatgcgatcagggtagcagatctggtctaatcagaccagatgagattaacacaaagcaggaaataacattaactaacagaaatcagttaggtttttgtgtgtccacgtattactcctaccattttctgattttatggcatgaaatttgcttttttcaaaattgcacaaatctttgaaatgttaaccatatataaaattggagaaaaaacacaaaaatagcaatgatatattaacagaaaagggattaaattctttatccattcaggatttcaaagggtgtgtctctagttgtccagataatctgatttgggattagaaatcaatttcaagcaatgcaaactcacttttacttctgaatcctaaacatcagtaggaaaggacagggagtaaaaacagataaacataaaatagtagctttggttaaagcagtaaagttctaaggaatggtaactgttaatgggaaaaaaattcaagcagaaaaggtgctaagaatgtttcctaaggaatgtatcctttcacaacacagtgggtgtagctggtagtggccttgcagatgtctgtgcctaataagttttcagccagagaaaggtgtcatttgtatggattctggcttgtcttttctatttcattcacttctttctctttttcttgttttccctagctttattgaggtataattgacaaagattgtatatatttaaggtgtacaatgtgacacttctctctctatatatatgtatactttgcaaaatgattaccacgatcaagctagttaacatattcatcacctcacatagttatcttttttttttttttttgagacagaatcttgctctgtcacctaagctggagtacagtggcgtaatctcagttcactacaacccccacctctcaggttcaagtgattcttgtgcctcagcctctcaagtagctgggattaccggtgcatgccaccacacccaactcatttttgaatttttaatagaggtggggtttcaccatgttgccaggctggtcttgaactcctggcctcaagcgatatgcccacctctgcctcccaaagcactgggattacaggggtgagccaattatcttttttatatcatgagaacactgaaaatctagcaaatttcaagcatacaatatatattagctatagccaccatgccgtacatcagatctccagagcatattcattttttttccctagcctgagaaggacatggtgacatttaattaattaatttatttatttatttattttgagatggagtttcactctgtcgcccaggctggagtgcagtggcacgatctcggctcactgcaacctccatctcctgggttcaagcgattctcctgcctcagcctaccgagtagctggaattacaggtgtgcaccaccacagccagctaatttttgtatttttagtagagaaagggtttcaccacgtctcatctcaagtgatacgcctgtctcggcctcccaaagtgctgggattacaggcgcgagtcaccgtgcccggccacatatttattttataaatgaaagtttgccataggcatagtagctcacgcctgtaatcccagaaaggctagagtgaggagcagtcacttgagtccaggagttcaagacaacctggacaaaatagcgagaccaagtctcgaaaagaaaatttttaaaaaattagctgagtgtggtgcgtgcctgtagtcccagctactcaagacgctaaggcaggaggatcgcttgaacccaggaggctgaggctgcagtgagctgtcatggcaccactgcactctagcctgtctgacagacggagaccctgtctcaaaataaatcaagtttgcaccatttgatcaacatcttcccatatgccccaccccatgcccctggcaaccacccttctactctcagtttctaatactttattttctgatgatgatgatgattattattattattattattattgagacagagtttctgtgttgcctaagctgaagtgcagtggcccaatctcaactcactgcaacctctgcttcccaagttcaacccattctccttgctcagcctcccgagtagctgcgattacaggcatgcaccaccacatctggctaatttttatatttttagtagagacggggtttcgccatgttggcaaggctggtcttgaactcctggtttcaagtgatctgcccgcctcggcctcccaaagtgttgggattacaggtgtgagccacagtgaaaagagtttttttgttttaatttcaactgcttgtgataacacaatattacaatattcagttcattttggtttattggcattgtaatagacatctccctaaattcacctaggctaatatttggtgaatattttattttattttagattcagggagtacatgtgcatgtttgttacaaaagtattctgcatattggtggaaattggacttctagtgtacctattacttaaatagtgaacattgtacccaatgggtaatttttcaatacccatttccctcccaactcccccgctggagtccccagcatctgttatttccatccttatgtccatgtgtacccactgtttagcttctacttataagtgagaacatgcggtatttggttttctgtttctgagttagttcacttaagataatggcctccagctccaactatgttgctgcaaaggactaatttcattcttttttatggctgcataatattccatggtatgtatttcacattttctttatccagtcaaccactggtagactcttaggttggttccatgactttgctcctgtgactagtgctgcaatcaaaatatgagtgcaggtgtctttttttatataatgatttctttccttttgagtagatactgagctggatcaaatgatggttctatttttagttctctgagaaatctccatactgttttccatagaggttaactgatttgcatccccaccaaatttattgaatactctttgtaaacaaaatcaagactctataaatatgtttgaaatattttctttccttatttcactggttagggagcaatccaatgtttcatagagatgatagctcaagcagaaaacttttaacaataaattttgttgtaactactttataaaatatttttcacatcaagttttttttttttttttttttaagagtctcactctgtcacccaggcaggagctcagtggcatgatcctggctcattgccacgcccacttcccgggttcaagggattctcctgcctccaccactgaagtagctgggtttacaggcacgtgccaccatacccagctaagttttgtgtgtgcgtgtggcttttttttttttttttttttttttgagacggagtcttgctctgtcagccaggctggagtgcagtggcgcaatcttgactcactgcaatctccacctcccgggctcaagcaattctcccatctcagcctcctgagtagctaggactacaggtgcatgccatcatgcctggctgatttttgtatttttagtagagatggggtttcaccatattggtcaggctggtctcgaaatcctgacctcaggtgatccacctgcctcagcctcccaaagtgttgggattacaggcatgagcaaccacacccggcaagttttgtatttttagtagagatggtgcctcaccatgttggccaggctagtctcgaactcctgacctcaagtgatccgccctcctcggcctcccacagttctgggattataggagtgagccactgtgcccagccaaggatatttcctaatagttctagtttattaagtgcctttttcaggaataaacattggcatttaaacattttaaatgcattcattgagatgattttattatgttcttgtatccatatcccgttaacgaagtaaattgcattgatttttgaattttaacccaaacttcctgcattttggaaatgaacaccatttgcgatgtatatgtgagtagattttattttcaaatattttgttttggataattttaatgtatttgtaaaattttgttatcaggaagtgctgacctcagtaactaaagtgggtagtgcttcctcttatatgctctgggagagtttatgttaagttataattatttctttgaattcatccatagagccatgtaggcctaactttttggttgatttgtctttaattatgccagtggtgcaattaattactcatctcttttctatttctagcttgcagttttaaagaatccaccaactgttgaaacaaatccctagagacacaaggcaagagactgaatcatcaaagtaaagtctctctgagaattattgctaagaatggctttagatctaagaaccatatttcagtgtgaaccatccgagaataatcttggatcagaaaattcagcgtttcaacaaagccaaggacctgctgttcagagagaagaagggatttctgagttctcaagaatggtgctcaattcatttcaagacagcaataattcatatgcaaggcaggaattgcaaagactttataggatctttcactcatggctgcaaccagaaaagcacagcaaggatgaaattatttctctattagtcctggagcagtttatgattggtggccactgcaatgacaaagccagtgtgaaagagaaatggaaatcaagtggcaaaaacttggagagattcatagaagacctgactgatgacagcataaatccacctgccttagtgagtacagggttctaacttctgggatgagagacaaaggaaagtaaggaataaatcacagtcagttagagttgtctggaagttagagaagctattggaggtccagttattagtcagctcacactctcccaccattctcacaaagaataatcttcaatgtcctaagttctcaagaaaaaaagcaaaaaggtatatatctgtttattctgtaggacatataggagccaaacatattgatgtttgattaacttaattttagtctgcataatggcagactctgagaaattgactttttggcatgatatcagctcactgcaacctatgcctcccaggcacaagtcattctcgtggctcagcctccagagtagctgggattacaggcgtgctccaccaaggccggctaatttttgtatttttaatagagacagcgttccaccatgttggccaggcggtctcgaactcctggcctcaagtgatccgcctgccttggcctcccaaagtgctaggattacaggtgtgagaccagcctgaaattgacatttaaatgaagacatcaaggttgaggaagaaatgtcttgacaagagcttgttcttctgtcagggaactctaatcaagaaagacattctaaagaagcaattacggtagatccttattctcagagcccatatttgcaaaattgctaaaatttatttgtaagcttaaaataaatacctgaggcatcttctccgtcattttcagatatgtgcaggtggtaaaatatttgatttaccttaggtgcatgtttccaggtgaggttgaacaaggccacaacctcacttcctattttggttcctacagtgtaaataagtgtccttttcacagtctatttagtggcacatttttttttttgctttttattgataactttgttgtttaaagtgacactgaagtaaaatgctgaaacactgtctagtcttcctaagtgcaggaaagttgctatgtattatggagataatacatgtgttggatcctctgagttcaggattaatcaataatatatattaaatggggtgtctttgaacatatacacacataaaacaaactcatgtattgatcagttgacaaaaataatgtagccagaagctcacaggaaactaaccctgaatttttcctaggggaaatgattcagtacttgtaaattcaatgtccatgtgactttattaaacataagagcttgtagtaacaagaataacaccatcagagatggtggacaaaatatgtgatagccaatacttgagggagcttgtgagagcctgttaaggaccacttttccaaaaagtcttctgttacacaacagattcagatacaacagtgatctggctttctttacaggtccacgtccacatgcagggacaggaagctctcttttctgaggatatgcccttaagagatgtcattgttcatctcacaaaacaagtgaatgcccaaaccacaagagaagcaaacatggggacaccctcccagacttcccaagatacttccttagaaacaggacaaggtaagtcaggtgaatctgcacaactgaggagtgttctatgtggaccccttcttaagtacaacttcattgagtgtctattttcacaggatatgaagatgaacaagatggctggaacagttcttcgaaaactactcgagtaaatgaaaatattactaatcaaggcaatcaaatagtttccctaatcatcatccaggaagagaacggtcctaggcctgaagagggaggtgtttcttctgacaacccatacaactcaaaaagagcagagctagtcactgctagatctcaggaagggtccataaatggaatcactttccaaggtgtccctatggtgatgggagcagggtgtatctctcaaccagagcagtcctcccctgagtctgcccttacccaccagagcaatgagggaaattccacatgtgaggtacatcagaaaggatcccatggagtccaaaaatcatacaaatgtgaagaatgccccaaggtctttaagtatctctgtcacttattagctcaccagagaagacacaggaatgagaggccatttgtttgtcccgagtgtcaaaaaggcttcttccagatatcagacctacgggtgcatcagataattcacacaggaaagaagcctttcacatgcagcatgtgtaaaaagtccttcagccacaaaaccaacctgcggtctcatgagagaatccacacaggagaaaagccttatacatgtcccttttgtaagacaagctaccgccagtcatccacataccaccgccatatgaggactcatgagaaaattaccctgccaagtgttccctccacaccagaagcttcctaagctgctggtctgataatgtgtataaatatgtatgcaagtatgtatattcctatagtatttatctacttaggatataagatataatctcctgattatgctttcaatttattgtcttgcttcattaaaatgtaaggctaaggagagcatggaatttgtcagttttgttcactaaagtattccaagtggttgggaaagtggaacatttccaagaaccaataaatttctgttgaataaatgaatgaatccataatgttgatatccttttttaaaaaaagagatggggccggccgcagtggttcggcctcccaaagtgctgggattacaagcgtgagtgaccgtgcccggcttttttttttttttctgagtcagagtcttgatctgtcgctcagactggagtgccgtggtgtgatcttggctcactgcaacctccacttggaggtccaaaattaatcatagacaccaaaccacagatccagaaatctcagagaagaggaagcagtgtaaataccaaaaacctacaactaggtacatcatattcaaactacagaaggccaaagatagagaaattcttgaaagaagatggaggtgggagagggcactttacctgctgaggaacaaggatgagatttagagtagaattcttgtcagaaaccagataatcaagaagggaatggagtgaaagttcaaaatttagtacaaaaaataaaaccccaccctaacatctatatccagcaatgttatctttcaaaggtggaggagaataaagcttttctcacacaaatactaaagaattcatccccaaaggtcctgttacagggtccctgcattacatgtgaagcaatccagtagttatttgaaggtcgaattagattaaagatgtttaggctgggcacagtgtctcatgcctgtaatcccagcactttgtcaggctgaggcgggcagatcacttgagtccaggagtttgagaccagcctgagcaccaaggcaaaacctcatctgtacaaaaaatacaaaaaaacaattagctaggtttggcgacatgcgcctgtaatcccagctatttgggaggctgagatgagaggatcacttgaacctgggaggcagaggttgcagtgagctgagaacagaccaccgcactccagcctgggtgacaggctcaaaaaaattttaaaaagatgtttattgtaacttctaagggaggaattaatatttttttttttttttgctggcaactttgattaatttaaacatacaaaaattagctgggcatggtggtgtatgcttgtaaccccagctactcaggaggctgaggcaggagaatcgcttgaacccgggaggcagaggttgcagtgagctgagatcgcgccactgcactccaccctgggagacagagcaagacactgtctcaagaacaaaaacaaaaaagcccaggcgcagtggctcacctgaggtcaggagttcaagaccagcctggccaacatggtaaaaccctcgctctactgaaaatacagaaattagccgggcatggtgctggcgcctgtagtgccagccacttgggaggctgaggcagaagaattgcttgaacctgggaggtggaacttgtggtgagccaagatcaagccattgcactctagcctgggcaacagagtgagactccgtctgggaaaaaaaaaaaaaaaaagaactgataaacaaattcacctgtgtagctgaattcaaagtcaacatgcaaaagtcaacatgtaaaactcatatgcccttccatacactaacaatgaaaaatctgaaaaggaaattaagaaaacaatatcatttgcaatagtaatgtatatggtcaaatgatctcaacaaggctaccaagaccactcaatggggaaacgatgatcttttcagcaaatgatgctgggaaaatgaaatattcacatgctaaggaatgaaggtgaacccttacctaacaccaaaaacacaaatgaactcaaaatggactaaaaacctaaacataagacccaaaactataaaacacttaaaagaaaatatagggtgaaagttttatgacattgaatttggccataatttcttggatttgacaccaaatacacatgtgacaaaagaaaaatagaccaattagacttcatgaaaattaaaactttagtatatcaaacaataacaaagtgaaagaggaacctatttaatgagaacaaaatacaggttgaatatccctgagccaaaaatctaaaatccaaaatgctccaaaatccaaattttttttttctttttttttttttggagacggagtctccccctgtcgcccaggctggagtgcaatggcgtgatctcgactcactgcaacctctgcctcccaggttcaaacgattctcctgcctcagcctcccaagtactgggattacaggcgctcgccaccatgcccggctaatttttgtatttttagtagagacagggtttcaccatgttggccaggctggtctcgaactcctgatcgcgtgatccacccaccttggcctcccaaagtgctgggattacaggcgtgaaccactgcgcccggcccgcccgactaatttttgtatttttagtagagatggggttccgccatgttggccagcctggtctcgaacttctgacctcaggtgatccgcccgcctcggccttctaaagtgctgggattacaggcgtgagccaccgcgcccaaccccctgaaataatatttgtttgcctctaggggcaccctgagcttcgtggagtctgaaataatgtctctaaacacttaagtgatcagttacggaaaacacttcccagaaatctgggaaaagcccctttaagaaggagtaaatacctccttctcccctagaggccgaagtcgccatttccctgcacggggcacagcacctcagaatacaagttcgcagaggtcaaagcagtggacacactccgaagagctccgtggagttttggaaactacattatccagagtgcagagcgcaaaacggcggcggagttgagccaatgacagcccaggatagcaacacttccgcgcacgcgcagcgcgacgggccggaacttccggcgtcctcctcgtggcggtcattttggcctctgtcctgtttgtccagcccgccagtttctgcagtggaggtcgcgactgagggacgggacagagaagtcgcgaaagtgggccagaggttctgcgacaccacctcgggtgagctgcgccaggcccgggatagggactgttgtgttcgaatgcccgccccggtcggccgccgctccccgcctagtccacggagctcaatggcggcagtcgcgctgagggactcggctcaggtgagttgtgcgtcctccgggtctcgcctacctcccccagcagaagccttaaggcccagtgagggatgcctgctcacagccctgcagcccaggccccagtaccctggacaagaaggcgcttgtggattggacccgtttgtgacgcccagtgtgtacggaaatgtgacgggcagttgactggcgcgtgcagaacttggagctgcgactaagctgggggggattcaggagcctggggtccgtctcgggtctgcaggaacatagagtgaggcagagttgcacctgacgaatttgacgattctgaggacactggcagccttcgagatttgtgaacagatagggacactgggctaggatttcctaaagctatccaaaagttgctcaggggaagaacaggctgaagagaggtaatagtagttaggcataggaagactgagttcttgtccaagctcacgcagctggtaaagtcagcactgagaactgaggtgcggagatagtgcagccagcccaggccacctggctccaaaactggaccagggtcattgggcgacctgagcctcgccactcgtctagccttgggccctgagactttgagcaaatacaaagcccagagtcttaagtccaggttagattatatgaagctgttggcagccgggggaaaggagatgtagaaggttgtccaaggcaaagttaccagtatatgctaagtttggagaggaggctaagatagttcaggaacctacaattattttcttttcatgagaacagggagcagtgtagtagaagtcagacccggaatggttccctgagaagttgagttgtctattcgttacttaatagtaacagtgggaggtttggagtggaagagggaggtgatctggttctggtcttattaggctccctgtggctgcagcatgggaagccaactgaaggatgaggtggggagacctgggaggagactactgggataggccaggtgaatgtgatagaatgtgataggccaaaatggtggctgtgaagatgcgagaagcagttggattctggattcattttttaagtagggctgcctgaatttttagttttgagaaagagagtggagtcagggatgactgaaaggttttattttggcagttagaagtgtggaagctccatcaactaagatggggaagtacatagtaggagtagttttcatttgggatatcagaagttttatttttgacctgctaagagtatgagagctttcagagaatggttcatgggctgctggaactgtaggtcaggaacagtgaggagagattcagaatggagacttttccaaaaggtagtggacaatctgtgggccggggtggagctgtggatcacatttagtagaggggaagcctgctcacaatgataataatagttgtcaaggaaggggaggggaaggtcaaggacaggtctcctgtgtgagcccctggttgtgtgaggtgttgcaacacaggtcttggacagaagtgttcacggtgagggtcgtacagagattatgatctagcatgtggccaaggcttctcaggggtgagtagacatgagatgaatgtagaggcataggagttagacaggatgatgctaggactggtgcgtattcacctctctgcagactgaccagggttttatattaactcttggtgggatctgggaagtttcagtcaggctgtcacgttatcttaggggcataattggccatctgtgggactcgatgggcccggggtagagagccactggggttggaccttgaattagtggtagttggagagaggaaggctgtgactggttgggggacagcaatcacagcccagaagtggaagaggccttggttatctgagatccacaggtgattcttgatgggtgaggttgaagcaaggaatagtcaggtagaaaggccttcatggtatgacttgaggctgcccctaactttaggtgcagttagagatctgggatagtactgaaccgtatttgaatttgccagccactctctgggccccatatgctgagtaaccagttgggaggccaaggagatgctcatggtatgaggcaggaagtaagctgtggctgtgggagtgacactgtgagagaagtgtggtagagtattgtgcacatggagacaagaatgtgaagtggtggctccttggtgttgaggacacaagggtgaagtatgaaccaagacccttggttgtgtttgggagccatggtctgttgtcttccaggagagtttccttacaagagagtatggttccttgcatggcaggctcagagcttagatacttgcccacctgcctgttgttgctgtgggagaacacaatgaccaatgggaccataaggagagagggggcattagtgtcaccaggccctgttgcattctttcaaatgagaagatggagaggaggatgaacaggggatagatgcagcagggatgaatttggggtcctaggagagatactcataatggaatgaactgtcccaatcatggaaaagctgtgtgacctttgaggttgtggctgtgggaatgcagctgtgtgagacaggtgtggttcaaagagtgatgtacatgagaagagagagaataaactgagggccatatgggtgaacgggagtcagaggggtaaagggtaagcccgtgttagttgtgtcttggaagatcaatcttggggacttcacgggtattgcctgacaagacaaacgtcagatcactcacaccctgtctatggccagttctctctctagctggtgtttgtgagtaacgagaggtatagcctacctgccatgcccagagcttagatagcatctatctgttcataggcctgttgttgctattcgaggactcagtatcagtggaactgtggggagagggtaggcatcggtggcactgtggctggttatctccgctgaggtgggcaatagggtgacctggggatggatgttgggggcaagaggataatgaactccgggtctgatcgtggattgaactattcctgctgtgacagggtatgacctttgaggatgtggccatttatttctcccaagaagagtgggagctccttgatgagtctcagaggttcctgtactgcgatgtgatgctggagaactttgcacatgtaacatccctgggtaaggccctagcatccctccgagtgtctgcttttctttttgaccccagagttacctctgtctcaggagtcttgctgtcagcctagtggatcttatttttcttgtcttccccctgtcaggatgactgtgtacagattcatggtaccttgtggcccagtttctgcccttttcctctagctgccatttccttatgtccacctatatcagaaattacaggcattgtcatagttactacttatgtgaactatggagctctttttacaagactctcctttgagtgttttttgtgagtgctggtcactcccttgtcctctctttccttaagacttacatcattcatgtgttatgtggtagcacaatgagggctgcagggagagccctagttgcttcacagagtgaacaaagcaagatggtctcagaggaggcctggccccagtgagtggcagctggggaagggcatgacatcatggttgtattagaatcatatccggaacctgtgatgtgtccagcagtattttggtgcaagtgccactggccataactcgtttctacttctacttccctatacaatactgtgctgaattgttgtttcatctgtcacttccagtgtttggctacctccaccctcgtggtctcagtgtgtcacttgttcgtctccacagctcacttcttttcagtgttgttcagtcttgactcactgtgttgtgaggtatgcacacagcctcaaatagtcctccttgatcaccagctatcaagtttcaattggattttcctaggactggacaacagcagtcttctgtacagcacatacatcactagcagacaaagtcctgctgagggctttggcagagagtgagttggagaccctccttctcctcctgtgctatacctcatccttgtatcctttgcgtgatgagatgacatctctaaaatcttaaaaaacccagtacttcaaaccagcctattcctccccagttccgttgttctcagaacagttccatgcactcagttcttgtgtctcacacatttttgtgatacatctttctccttccatgaaagtcagcatgcatttcatcagcatttctctgctttcaggttattgccatggaatggagaatgaggcgatagcttctgagcagagtgtatctatacaggtcaggacttctaagggcaatacacccacccagaaaactcacctcagtgagattaagatgtgtgtcccagtcttgaaagacattttgcctgcggctgagcaccaaaccacatcccctgtgcaaaagtcatacttgggtagcacaagcatgagaggcttctgcttcagtgctgaccttcaccagcatcaaaagcattacaatgaagaagagccctggaaaaggaaggtggatgaggctacatttgtgaccggctgcagattccatgtgttgaattatttcacctgtggggaggccttcccagcccccacggacctactccaacacgaagccactcccagtggtgaggagccacacagtagcagcagcaagcatatacaggcatttttcaatgcaaaaagttattacaagtggggtgaatacagaaaagcttcaagccacaaacacacacttgttcagcatcagagtgtctgttctgaaggagggctttatgagtgtagcaaatgtgagaaagccttcacttgcaagaacacacttgttcagcaccagcaaattcacactggacaaaagatgtttgagtgtagtgaatgtgaggaatcctttagcaaaaagtgccacctaatcttacacaagataattcacactggagaaaggccttatgaatgcagtgatcgtgagaaagcctttatccataaatctgaattcattcaccaccagagacgtcacactggaggagtgcgtcatgagtgtggtgaatgtaggaaaacctttagctacaaatctaacctcattgaacaccagagagttcacactggagaaaggccttatgaatgtggcgagtgcgggaaatcctttagacaaagctctagcctttttcgacaccagagagttcactctggagaaaggccttatcagtgctgtgagtgtgggaaatcctttagacaaatcttcaatctcattcgacatagaagagttcacactggagaaatgccttatcagtgcagtgattgtgggaaatcttttagctgcaaatcggaactcattcaacaccagagaattcacagtggagaaagaccttatgaatgcagagaatgtgggaaatcctttagacaattctctaacctcattcgacaccgcagcattcacactggtgataggccttatgagtgcagtgaatgtgagaaatcctttagccgcaaatttatcctgattcaacaccaaagagttcacactggagaaagaccttatgaatgcagtgaatgtggaaaatcctttacccgcaaatctgacctcattcaacaccggagaattcatactggcacaagaccttatgagtgcagtgaatgtggcaaatcttttagacagcgctctggcctcattcagcaccggagacttcatactggagaaaggccttatgaatgtagtgaatgtggaaagtcttttagccaaagtgctagcctcattcaacaccagagagttcacactggagaaaggccttatgaatgtagtgaatgtgggaaatcctttagccagagctctagcctcattcaacaccagagaggtcacactggagaaagaccttatgagtgcagtcaatgtgggaaaccctttacccacaaatcagaccttattcagcaccaaagagttcacactggagaaaggccttatgaatgcagtgaatgtgggaaatcctttagccgcaaatctaacctcattcgacatcggagagttcacactgaagaaaggccttaaatgtgaagggaatgtgctatttctttattcagtataatagcactggaggagactgtggtagccatcttcgtaaatttaaactttgagcacccacagtggggtattcttcataagtttcaggtatgtgggaagctctgaggaggttcattgtaatttctaatctgccgaggcctatagcctgatttatgtcactgccaatttctgaggctgaagccatttcacatttcacccctaccacctggcaggtgcacaccatgtgcatgagtcacttccccacagtgctcagagaagcaaacctctgtactctcccatttgcttggggaaattattaatagcccaagcatgtagggtcttcatgtcttttctctgactttagagtatacacctgacccagttgtggtccagagaatctgagttgtgctgtcagctttctaaggattacttttttaaggaacattgtcggtctcacatgatgcttgtaatgaatttttccacattctgattcaccagcctggaaactgcttggtgcacattgctttaatttataatgtttttataaaggttttaaaaaaatttacgcacctttaatcttgggtgttctattcattgcatagaatgacttgtaagcagaatagtgatgtcagcatgaaggggtgaatagattttgtggagatctcaaactttctgtactcagaagggacaatgtgatggcagaagacagctctttgttctgtattgctctaattggcctgctgcccaaggcctcaaagtaaagactgccaggctttgtgttcctgtattgtggcctggtgccatttttgtcaggtcagaggtcaccatgaaaaggaggcagttgtgacaatccccagtgcttctgtgaacgtgaattttgttcagttgtccacaggagatccacataattcctagcactggtgaggggaatctgttgcccaggtcctgcaaaggagccaggtgccatggcatataagtcagtgtagactggtgccatttgttgtcagactataggtgtggaggtgaaattacaggttcaacagtaattgggacagaaactccaggtaaatggggagtggagaagactgcagtaaattagatggaatgactcttctaaaagttcatctacaaattttccagtgaatatggttgtgtaggatcagtgcatacagaaattctcaggatcttctgtttactatcgctgagatcattatcagaaaatagtctggccgggcatggtgtaatcctaacactttgggaggccaaggcgggcggattgcctgagctcaggagttcaagaccagcctgggcaacatggtgaaatcccatgtctactaaaatacaaaaaattagccaggcgtggcagcatgcgcctatagtcccagccacttgggaggctgaggcaggagaatcgcttgaacccagaaggcggaagttgcagtgagctgagattgcaccactgcactccagcccaggcaacagagtgagactccgtctccaaaaaaaaaaaagaaaatagtctataaaggttttgtggctccttgtatcctgtctgggctgttcacctcaaggccattgctatgcaggtaggagaacaagaatagagagaaggatcattccgcggtccagggatgtggcttttgtgactcagccaacattcctattaattcaggtggcaacagccttcattgcttgccaaaatttgctgcccctgaggcaaggttgcctctctcagggcatgaggagagagagagatggtgaagtccatatcaggttgccaccctgattaaaaaaaaaggaacatctaggctcttaattttgagccactttttaaagctttttgaaggtctaatttgtataactgacatgcaacaaagtacacgtatccaaagtgtacagtttggtaaagccatgaaaccatcattacaaccataaaaatgaatttgtgtgtcacccatatatttaccttgtatctttttataatctttctcccttccccagctcttcaggttcaactgatttcctttacagtaaattagtttgcattttctggagtttttactgagatacatacacacacacacacacacacacacacacacgtatacgcatatacgtatacgtatatatatacatatgtgtttatatatgtgtgtgtgtatatatatatacttactggttttcttcatgctgtataattattttgagattcaaaaatgatgaatctttgtattgctgagtatcatgctgttctatggataagtcagtgtttatccatgtgtttagggacatttatattatttatagatttttgtatattacaaataaagctgctgtaaatacttgaattcatttctttatatggatatgtgttttattttcctcgtgttaataactcaaactgtaatgtcttagttacaatgtaggtgaatgtttaacattttaagaaatgccaaatttgatctaaatggatgtttcctattgtagtcccaccaagggtgtatgagagtcccagttcctttacatccctgccagtgcttcatgtggctaatcttttttattttagctctttgaatgtatgaatagtggtatctcactgtggttttcattgcatttccctaaaacttcctgatattgagcattttttaatgtttttatttgccacctgtgtaacttctttggtaaaattaaattttcttttaaaaattcctcaccacccattccagaatttgcatgtatgtgtgtgtgtgtgcacgcgcacacagacagggtctcccaggctagtcttttaactcctggccttaagcatttttcctactttccagccccagctgtggtcaatttgttttttcttttttttttggggggggacaagagtctcactctgtcacccaggctggagtgcagtgctgtaatctcagctcactgcaagctccgcctcccgggttcaagtgattctcctgcctcagcctcccaagtagctgggactacaggcgcccaccaccatgcccggctaatttttatatttttagtagaaacagtttcaccatattggccaggctggtctcaaactcctgactttgtgatcctcctgccttggcctcccaaagtgctgggattacaggtgtgagccaccgcacccagccaccgtggtcaatttcaaactgccatattgatgtcactgaacctggagttgggaagaatttctggtaacacacctttgtattctgtttccaatacactggtagagtatccaagatagccagaagaataaagacgacaataaaacagtaaaatgatcaggaagtggcaagttttaaatatttgttttttaaacaattttattgagatataatggacttaaattgtatgggtttttatctttcaccttagaagggattcagttgtatatttttaaaatatatattttgatgtttttatacatcgtacattcccaaaaccaaatgtttcttccagcccttttcaatttatcctttgcaacatataaattactgatagaaggacatattctgccttttgtaggggctatttacaaatgtccatcaatggaagacatcattataaaacctgatgaaccctttcccagtcttctatcatttatctttttttatttttatttttatttttttttgagacagggtctcgttctgttatccaggctggagtgtagtggtggatttatcattttgtcattctcttttttttttttcagcataaactatcaagcaattcatggttgttcttgtttcatctgtccccatgtggatttataatcagatatttcgttaaaggcataaagtcttcagattgcatttctaaaatttaaagaccgtttcgtaactataagattaacatacaaaataaaaattgtatgtgtacaaaattataaatgttttatatacagtactgaattgtatcaactgctgcttatttaagacagattgctatcagcatacaaaatatatttgatgtttagtaggtgtgtctttgagtttattaacctatacgtactgcttacttctttaatatttatgtaacgttgctaaactgcttgtccattagcttcccacattgtgctgggcgcagtggctcatgcctgtaatcccagcactttgggaggccgaggcggacggatcacgaggtcaggagatcgagaccacggtgaaaccccgtctctactaaaaatacaaaaaattagccgggcatggtggcgggcgcctgtagtcccagctactgggaaggctgaggcaggagaatggcgtgaacctgagaggcggagcttgcagtgagccgagatcgtgccattgcactgcagcctgggtgacagagcgagactccgtctcaaaaaaaaaaaacaaaacgaacttcccacattgttgatttggcttattaaatctcagattctgttcagtgtgttcaccgctcactccgccccccattccccagtatttcctgtatactagatattgatgaaatgagtgattaagatctgttccaagtggacaggtttatgttggtgacaaacctggaaacacagtgtgccttttgctaccacaacatgagcagcctggaaataaacattacaggtattgtgtgtgctggttgtgagacaggtgtgcagtagtgacagcacatcctagcaagatacacatacatctgtggcatacattgacagatgtaggaaactgacaccccccagcacagcctggagccatttgtgtatgccacatccgcaacagaaaagatgtatgacaaacctgaaacacacacacaggtatgtgcaaaacacgcaaggatcctgtgagacgggatggagatactgacacaccatagcagtctccacagagacttgtgggacggacatatgctagggatacccaaaaatctgatatgtggggccaggcgcggggctcacgcctgtagtcccagcacactgggaggccgaggcggacagatcacaaggtcaggagtttgagaccagcctggccaacatggtgaaaccccgtctctactaaaaatagaaaaattagccaagtgtggtggtgcgcacctgtaatcccagctactcaggaagctgaggcaggagaatcacttgaacctgggaggcggaggctacaatgatccgagatcacgccactgcaccccagcctgggcaacagagcaaggctccgtctcaaaaaaaaaaaaaatctgatgtgtgggccacaaacacaattgcactatctttgtggggcaattgtgatgaggcaggcacaacctgatgtgatactactactccctacacacatcactgcatactagatgatgtactgatgagggaactggttcataccccagcacaacctggaaatacacgtgtgagcaggtttgacctaagcaggagaataggatgtttatgggctttataggagggctcagccagattcagccagtttcagaagtaattggtcaagtacaggtgggagaaggaacactctaggggattagtactcattgtctgtcattgattttacacagggctggggaggagcagttgggactaaggacacctgctacaggggttgggaggcaaaagccatgggtacagagacgcgcgatggtcacgctggacattctcagttcttcatcttctctcccaatgtctgcagtagtgactgataactgagtgacagttcagtatggtgtggaggaagcatcctatggtggtgtttagatggaagaccgaaaggaccccaggaatgaatcattgcatggggttgtgagagagcgatgtgtttggagtgacaccagggaccctgttggaggtgttcaggcagtggcaatgctgaccatgggaagcaagtttgtggagaaggacttgaggccccaggtggcagtgtcccagtgtggttactcatgttctgggcttagcagacttggcagagaggaatctgtccagagtctcctgcatttccagtcagaggagtaaagggaccaaggcaagccaacccagttcagcgtagacctcagctgcttgtgtgagaaacacactcacccatccaaacccaaagaatggactaaaagacacgaagaacagcgaaagtgagactttcagtaacagtcttgcaagatcaggggactggtgtaggcaggcatatctagggtagtcacaacaggtaatttatctccttgcttgcaagtccctcctccaagatactcattggtccagtactatgaggttacagtcttcccagatgtcgtctaagtttcattatcccccttataacgttaaaccccggtccccttccctgcttaagttttgatttccaataatgaaacattcttccctttcatggcctgacccctcctctacattctgtgtacctattgtgaccttctagatgcatgagctgtgtggtttgttacatttgcaggctggctgccagtacttagatttatcatgccttgaaaatgggctatttaaaatattttcccacccttggcagctgtggtcgtgtatggatgttgcttgccctctctgaactgcagatacattaagagacaggaatgatcattcctctctactctttttggggggaagaaggaataagtaaggaggtaatccttaggaagtgggtcaatattagctccacatgaaaacagtagtcttggccaggcgcggtgactcacgcctgtaatcccagcactttgggaggccgaggtgggtagatcacctgaggttgggagttcaagaccagcctgaccaacatggtgaaaccccatctctactaaaactacaaaaattagctgggcgtggtggtgcacgcctgtaatctcagctactctggaggctgaggcaggagaattgcttaaacccgggaggcggaggttgcagtgagccgaaattgtgccattgcactccagcctgggtgacagagggagactccatctcaaaaaaaaaaaagaaaaagaaaaagaaagaaaagaaagtagtagtcttgattgtcagcatccagggaaatgtgcaaaccattctcgtctcagcctcctgagcagttggcactacaggcgaacaccacgatgcctggctaatttttgtatttttagttgagacagggtttcgccatgttggccaggctggtctgaaacttcaggcctcaagtgatctaccctccttggcctcccaaagtgctgagattacagatgtgagccactgtgcccagccggaattccttttttttttttttttttccttttggagacggagtttcttgttgcccaggctggagtgcagtggcactatctcagctcactgcaacctccacctcccaggttcaagcaattctcctgcctcagcctcctgagtagctgggatcacaggcatgtgccaccacacctgactaattttgtattttagtagagatggggtttctccatgttgttcaggctggtctcaaaactcctgacctcaggtgatccgcctgccttggcttcccaaagtgctgggattacaggcgttagccaccgagcccagcctctttttcccttcgttttattctaatcaaccactgaggttcaaagagggtctctagtcactaacccagccccgccccagcccactcagcccctgtccctggtgtgagccaccgcgccgcccagctggaattcttcagagtagaaaaaagggaaggctttaggtgtgctaattggagtctgtgggtctgaggaagccgaaggcaggctaactacaagtagggcctactctgtcattggttagggacacatacttgatttcatccatttgttcttaaattggaaagggagacaaacattagagaagctgttagtcaagtccttgacaggggttgttggggactttctcaaggtcacttccttgggaaggagtccttcagaaattcacactgagatctctggactctgcagccagtgcttcttccaaaaattccatccaagtagaagctgtggggtcagggggttctaagaagccccatttctctttctcttgtaccttaagacctgcctggatcaggtaaatgataaggcatcaactcactaggtgctggggatagtgctcggccctgcttaccacctgcctaccacaccttttgccaggatcccagagagtactgtgagcactcctattccacaaacataaaactgaggtaccaagaggctgcaaaaccagcagagtcctgatgctgggcagtggcagaggagggattaaacccaggcagcagagggagcagagggcctggggcagccaggcaccggaagtgctgcaagcaccaagacccagggtggtaacttgcagggggaggccagagcatgaaggcagagggaggttttgggtgcagcctccaagtagggaatggacagtttcagtgttgaggcagagtggcaaagacaagagacccacagcacccaggaaatccctcagctataaatacagtccctcagcacttttcactccccttcccaaggatactatcatcaccctctcctcaccttggaaagaaatcagggctccaactagagctgccttgctggaagctcgcactgtcctgtcccgatgtatcatccagcagccccaaggcagctcccctcattatcctctgtcataaagatatgatgtttgcttttcctctaggtaaagccagtaaggtaatagagcatcacctgttaggatgaactatgtgtgacaaatggtgctgtcaaattcgtatttgaggacttgttgttgtttatcttgaaaacgtgtgtaatgggctacatctgctaggccatatgaaggagtgaggcttttttcttaccttgcaatttcttagtggattgtctgtgatgtgcatcacattctggtttaatgcttaataaaagcgttttctgtctctaccttcgtggagaggatttctgggttgggagaaggttttgtatttatttcactgttgccatcacacacctgtctgctgggacaaaatctcaatcaccgatttcatcaacatctagtgtacaagttaaacaatgttagagattcaataagccacatctagaatacagcaaattctaattaaaaaatgactcagcaacttcaagaaataagaaaacaaaggtaaatggaacctgtaggttacagacttatgagatacaactactgaaagctattaaatatacatttggatcctgaataaaaatgatcttccttaagaaacacattgttttagacaactgagaaaacagaagcgataaaatatttacattttaaaatatatttgtgtgattttttggggggttataaaagagcctttacattttaaaattgcattctgaagaggctatgcattaaataatatgatatccgggagtataagtaaaataacgcactagtacacatgaggaccgatgaaacataaatgactatgaaatgataaatggtgaaggaaaaaaaaatagtgaaggaagactggagaaaggttcatctggcttcataacagtcttttccatctttttttgtaattgaacacagctgtaacaggagacaaaatatgtcattgtaccagtaattttacacaatgaaaattaattttatatgttgagaatgaactaaaaagacagaaggaaactgcgttccagggtgtaagcatgtatgaaaatatcaaaatatgcattttaaatataagcactttaagttccattatacctcaaactactttaaaaaactactcaaaatatccataacaaatgaatgaatgaataaacgaatactggtatatccacagaacatcatacttctcagcaatacaaaaaaaagaaactactcatagaggtataatgatgaatctcaaaataaatacgtgactatacccagggattaaaaaagagtaaatacattatggtttcaatcatataaaattctagcaaatgaaaactaatgtattataatggaaagtaaatcaatagttgcctataggcagataattattaaaggacaatgaggtaacttgtggaatgacacgttcattgtcatgattgtgaagaaacaacttcttcctaatcatttcactacattttattttctacattcttgaggttattcgtggccactgtatcagtatggtagaaacagaatatattaggatgctatcagcaactcttcccaattctacattcagtaacatgttggcagtttcaaaattggcatggtgggagcaattacaggttaatatgaatatcaaagctgatcaaattatatagtttaaatatgtaccatttattcttattaaaattattatcaggttagtgcaaaagtaattgccgtttttgcatgttggattttgccattttatattggaaaacattcttaaataaatgtggttatacatcattttaataggcatttctcgctttatgtttttttgctgacttactacttgctgtttatgtttattttagactatggaaatgttagacaaaactcaaatttcagcgatttttttgagatagagtcttgctctgttgcccaggctggagtgcagtgacatgatcttggctcactgcaacctccacctcccggggttcaaacaattctcgtgcctcaggctccccagtagctgggattacaggtgcatgccactatgcccagctaatttttgtatttttagtagagacggggtttcaccatgttggccaggctggtctcgaactcgtgacctgtgatccacccacctcggcctcccaaagtgctgggattacaggtgtaagccaccgcatctggcctcttttttttgagacggagtcttgttttgtctgtcgtccaggctggagtgcagtggcgtgatcttggctcactgtgacttctgcctcccgggttcaagtgattctcctgcctcagcctcccaagtagctgggactacaggcacatgccaccacgcccggctaatttttgtatttttagtagagatgaggtttcaatatgttggtcaggctggtctctaactcctgaccttgtgatccacctacttcagcctcccaaagtgctgggattacaggcgtgagccaccgcacccggctgagattttcttacttgagttcccaatgggtcgtaaagcagcagagacaactcacgatataaacacatttggcccaggaactgctaacgaatgtacagtgcagtggtggttcaagaagttttgcaaaggagacaagagccttgaagagaagtagtggccagccactggaagttgacaatgaccaattgagagcaatattagaagctgatcctcttacaactacatgagaagttgcctaagaactcaatgtcaaccattccacggctgttcagcatttgaaggaaattggaatggtgaaaaagcttggctgggcgcagtggctcatgcctgtaaatcccagcactttgggaggccaaggtgggtggatcacatgaagtcaggagttcaagaccagcctggccaacatggtgaaaccccatgtctactaaaaatgcaaaactcagatgggcgtggtggcgggtgcctgtaatcccagctacctgggaggctgaggcagaagaatcgcttgaacctgggaggcggaggttgcaatgagctgagatagtgccattgccctccagactgggcaacagagcaagactctgactcaaaaaaaaataaaaataaaaataaatcatggttcaaaaccacagttacttttgcaccaacctaacaaaatatggttcaaaataaaagtctgaatttcctattgtttttggaaaatcaggtttgacaaccctatgttgattccaccatctctctcctcatgtcctgggagaggattttgcctcagtgatcacaaatacaagtgaacagtgaaggccatttccacctgactcaacagaaatgttggctggatcacaaaggctgtatcaatggcctagacctcccttctctatccttgttttcctgcctgcatagcaatgaccttgaggtgaaaatcccagaggctacaggattccataaaatttctgacaatgacctcagctacacaagatacacaattctgtaggtcctgaggatttctgtacctgctcatccttaagagccataataacgaacatcatggaaacctctgtaaaaggggcacattctatttattgcagtgttattgcagttttccactctctatcaatccagtacttctataacaattataattcctactataatcttaccacctgtggtgctaccctgtggaattcaggatatcaaggcatacaggacctggggaacagatttcccccactggcactgaacacgatgcagtattccttgtgaacaagagaacaatttcatgttgctttcagaaacatcaaaggatgtcaagtaactgctgcctcctcaggctgacctctatggcatccaggatataaattaggacaataccctgtagttttttctcagaggccttgaatagcaatgaaaactaggctcaaactagagagagagctatattctgccatcctactgtccctgtccctgtccctgttgagctacacaatgtttgggatctccaaaaaaagttattcaccccttcatgttagcagaacccaactgttttcaaaccaacccatacatatagaacccccaagattaataaggcctttgttattgtacaaaccaaggcaataagaggcagttggttcccacagttggtgatttgaaggctggcaaactctatcaagagtcatgtgagaccaacaatatcctgaaatatgtagtccctcttttcaggtcaccagcagagtcctctgggccaaactgggtcaggtccatggcctaactcatcagaaaggaaaaaaaaaaaacggaataaatgcttaggctatttacaaattcctcccatgaacagaacaccaaggttcacttacctgaatacactgggatgggtgagtggtgcacactggtggtcacctgccaggcagtagaggtaaaatggcttccactatagtatcagcagagacataaatctgacatgggccctgggcagggcaaaaggtgcaatgcagttcacacatacctggaatttatgcagatgttcagatataggatgttcaattcaggctgatgccaccctcataagggatctccttcagagctgttatatcaactggacatccctacatatcaaaagtgtctttcccttgtgaactgtgtggcactcaatgagatatggccttcagctgaagctttctgacattcactgtgtactcaaggactttctccagggtgctaacagattttccacatttgccactcataaggcttttatcgactatgaattctctgatgtttaataaggctggagttatggctaaaggatttcccacattccgtgcactcataaggcttctccccagtgtgaaccctcctgtgcttaatgaggccggaattttgagtaaaggatttcccacattcactgcactcatagggtcttgatccagtgtgaactctctggtgttttcggagactggagctgtagggaaagaacttcccacattcactgcactcataaggcctctccccagtgtgaactccccgatgttgaaggagtgcagacctttggctaaaggatttcccacattcgctgcacttataaggcctttctccagtgtgaaccctatggtgttcaatgaggctagagttttggctaaatgacttcccacattcgctgcactcataaggcctggatccactgtgaactttctggtgttttatgagactggaatgatatgtaaaaaacttcccacattcactgcactcataaggcctctccccagtgtgaactccccgatgttgaaggagtgcagacctttggctaaaggatttcccacattcactgcactcatatggcctttccccagtgtgaactctccgatgtttaatgaggttagacttgttgctaaataattttccacattcatcacattcatgaggtcgtactgcagtgtgaactctccggtgctgaatgagactagagctttgcctaaaggacttcccacactctcgacattcataaggcttttctccagtgtgaagtctccaatggtcattgagactgtagcttttgctaaaggatttcccacattcactgcatatgtaacatctttctgtagtgagggttctctgctgctgaacaagtgtgtgtttaccgctgaatgcttttgtgtgttctccacagttgtaatgagtttttcctctgtgactgatggccccaccgtcgcttttgctatttgattgctccccagtgtgagcagcctgttgatggagaaatcccaacttggccaggaagtccttcccaacttctctgcaggtggaaggctcccctgacacatggaatgtgcaggtcttcacaaacaaggctctgcccacattgcttctgaaatgtttttctccaaggtgctgcttctgatgatgaacatctgcaatgaaatacaattatttcccacatgccccacctctatataatttctgcctatgatgtgtcccctagggcccagccaagagcaaaatgtctctcaagaccaggctacacgtctcacagtggtgggccttctagggagaaagatctgccttagaagtcctgagttgggtcactccttctaaagaaatgctcttgtcagaaggtgcctcctcatccaccactctatgccaaaaacctaaaagcaagaaatgctagtgaagtgcacattaactatggtgggagggggcagcccttatacaagtgtgtgtatgacaaacccaggaacaagtccatgggatcgtttgcatgacagtagagttgggttcagttgcagatgaggctgtttagcaattctaggataaagattacaagaatgggccgggtgcggtggctcacatctgtaatcccagcactttgggagtccaaggtgggtggatcacaaagtcaggagtttgagaccagcctggccaatatggtgaaaccccgtctctactaaaaatacaaaaattagctggacatggtggtgggtgcctgtagtcccaggactcaggaggctgaggcaggagaatcacttgaacccgggaggcggaggttgcagcgagccaagattgcaccactgtactccagcctgggtgacagaaggagactccgtctcaaaaaaaaaaaaaaaaaaaaaaaagattacaggaatgtgggagatctcaagaggtaaaggccacaaccatgaggtatcacaaagagagaggcagggtctaaaactaaatcctctgcaaacaactttagcagaagcttatctgctggcgacacatgagtgctatgtagaatagtatatgcaagcccatggaaatacgactgcaatgcagcagctggccttcaaggactgtttaagagtatgtgcaaggacaggcgcagtggctcacacctgtaatcccagcactttgggaggccaaggtgggtggatcacaaggtcaggagttcaagaccagcctggtcaagatggtgaaaccccatctctaaaaaaatacaaaaatgagccaggtgcagtggcatgcgcctgtaatcacagctactcaggaggctgaggcaggagaattacttgaacctgggaggcagaggttgcagtaagccgagatcatgccactgcactccagcctgggtgacagagtgagactccgtctcaaaaaaaaagagtatgtgcatacctcatgacacactatatagaggctaacgttagaaagaactgcaggtgtagcagtgagaaaaacagataagatacggagtccagagatgtgaggattagccccaggctggatgttaagagcagaagtgacaagtagtagagctgacttgtcagcaaaatgtcaagaatggtgaagggaaaccggaagtgagctgtgaccactggcattggcaccaaaatgctcgccaaacagaacaggttgctgctctgatacagcatctggataatgtaagtactaagggaagaaagaacagaagagcagcctgcactgtcccacaaaaaactcagcacatgacagcccacaggaaaaacacacacacacacaaatactacaaagaaaatttcagaggaatactttgtaagaagagtccatggtctacataagtagtgaccatgtcagtgacaataactcctggcataggcaggcataatgaaatgccagctcgggatggaagtagtagctggggcacacaggatcctcaaatctggaaaaagtcacccagacatggaggggacaatcaaggtgggatccactagggtgactgcaagactgcagactctgaatccttccctgtgaggctgtgaggaaacaggtactggggctcctcaaggagaggagaagacagtatgcacaccttagtcttaccaatgacagaactatgcagggaactgagaaagaagcagagcccatagtcttgtcatgagaaggacagacctgcctatagagaaaagaggaagggcacagactagctcagggcacaggaaagggtaaaagaaccttacctagagaggttaaaagagccaagttctccagcatcacatcacggtacaggcatctttgagcctcatcaaggagaccccattcctcccaggagaagtgtacggccacatcttcaaaggtcacagtgccctgccacaatgggaacagatgaaaccaccaagagcccctatcccaaggacccacaatgcatacccccacatctttaccccatgcccattctcttcccaagctccccaactgagaggagaaaccagcacatggataaataggcatctaagctgggggcctggcatggaaggatccatactatcccatcatgaaatccccctgaaatgtccaaggtcatctaagtctcaataccagggccctgcagctgtcacttactccctttccagatgcacatcattcttcagaatacacatccctcctatctccagacaccacagccccaagcccagggctgccacctcactgcccacaccataggcatctccctgctcttacctcccatgtcactgttttaatctcttcctctttaccccattagcgaaggcaggattgccacactagggttatggatatggacaaacacacaatacctgacactagaaagacgatacagcagttgggtatggtggctcatgcctgtaatcccagcactttgggaggccaagacgggtggatcacgaggtcaggagttcaagaccagcctgaccaatatggcgaaaccccatctctactaaaaatacaaaaattagccgggcgtggtgaagcacacctgtaatcccagctactcaggaggctgaggcaggagaattgcttgaacccaggaggcggaggttgcagtgagccaagattgcgaaactgcactccagtctgggcgacagagcgagactccgtctcaaaaaaaaaaaaaaaagaaagatgatatagcagtttattaatcatatgtacatagaacctgggagatgaggacaacatgtaccacacagggtcacatgggggtctagtccagaaaaaaagtgaataaccaaaaactgtgggatgcaagcactttgagaacaaaaggatcaactgccccctggttcccacaatgggcttgtttggaaaactccatgacctggtagggagctgaaatctgctacaaagtgataggcagaaattgtgcctggtctccttgattaaaagggttgtctgtttgggagaagagtagggagggaaacttgtactcaggccatttgatgccaccctgatttcaccagatgtcatactgggccttaattttagactttacaccataacttagcacacagcgtccagagtatgctcgacagattcaaacggatctaatactaccctagatctcccagggcatccactagtggtagcagccccaaatcctatgagggctccctggctggctccattctttgcctcagatttaggccacacagaaccacatgtgcatctcagatacccatggccctattccacttccgtgctgcacttgctagcccctcagcagtaacaaccttcctctgtccacttaacactcaaagactagctccactgatcacctaccccaggccaagtgactgtcacagatgaccacattggcacctggccttatcctccaggttgaataaacaccctaggccccatcaaagtcatcaaaaaatcctggtgattccacagagtgctgaataagcacaaaggaaaaaaaggacagccatttgcctcaaatacacctatgcctctgcatccaccttatatccactcttcccttgaaagtgtatgccacctgcccaactatcctctccaaacaccctacctccatagccactaacctcccttacctctgtttagaaagcccaagaatatcacccacttatccaaccaaaaggcttggtccttagcccccattctgcccttcctggccaaataacctgtaccaccatgcctaaagattaacccttgtaggccggatgcggtggcttacgcctgtaatcccagaactctgggtggctgaggcgggtggatcacctgaggttgggagttcaagactagcctgaccaacatggagaaaccctgtctctactaaataaatacaaaattagccgggcgtggtggcgcatgcctgtaatcccagctactcgggaggctgaggcaggagaattgcttgaagccgggaggcggaggttgtggtgagccaagctcgcgccattgcactctggcctgggcaacaagagagacactccatctcaaaaaaaaaaaaaaaaaatagaacaacccttctaaatgtaatccacagctcactcaccttagtccacacaatgaccaccacattttggatgtctccattctgaagcactccccagatttccagacctgggtgttcagccacctacttaatgcctacttaatgtctctgaaacatctcaaactcttacatgaccaaataaagctcctgttgtctccagtgaatattactgttaataccaacttctccatctcagttgaagaaccatggggtcatcgctgaatcctgtttcactccctcgctgtctacatcagaaaatttagttgctccctttaaaaatttgcatccagaatgcaacacatctcctaatcaatgactctggtccattaccctggactggctgtagcttccactctgatcttctttcctcttccctcaaccccacagtctgctctccacgctaacgggatggaccctgttaggactttggtaagatcacctccctcttgtaacccaaatctctcattacctccagaataggtacccaacttctcaggcagccactgcagtcctgactccttccccctgctctttgttcccagctaaaaggaaacagatctatggtttcctcaaaaatctcagcttagttttactaagcacttgcgcctcctgataccagtgccagagataacctttcacaagtttccactggctgacaaaaatgggaacacctcagtataacccctgtaacctctggcatggacttaagagccctgggcttggaatttctccagggcaccagacccaggattggggtaacagcacttaagaatactaggaaaccacaatcccaagaacatgggggtagaggctactgagggaccgaacactctccacttccctatgtgagttccatacgcccttctacaactgggagaaccagggaaagaggaatgcatccctggtgaggctagatgagctcaagcctccctgtagccctgcctggccctgaactcaggctggctgttttactttctggtctcagtgctgtcacctcttgccaactgtagggcaatgaaaaaaagatgtagcctcccactatctcaatgtcctcatcgccccatcgctgctcttcctgtgaacagtctttggaaaagtttttaaaccctaacatagggcgggcacggtggctcacgcctgtaatcccagcactttgggaggccgaggcaggaggatcacttgtcaggagttccagaccagtctggccaaaatggtgaaatcccgtctctactaaaaatacaaaaaattagccggacgttgtaatcccagctgcaggcttgtaatcccagctgctggggaggctgaggcaggagaatcgcttgaacccgggagtcggaggttgcagtgacccgagatcgcgtcattgcactccagcctgggcgataagagcgaaactccgtctcaaagaaaaaaaaactaacataaatggcgtccctcctttgttcagaactctccgtggcttctagcatcctcacaatgacagtacaaccctaggagtaactccgcctcatattcttcgttccctgcagaaaacagctttccgaattctcctggctcagtcgcgcctcaacctttgcacgcgccggttcctccgcctgtcacgctctcccacacctcgtcacacgcagtgtcaaaaaaagggccccacccacgaacgcctcagtgtccccgaccctgggcagcggggactcgagcaggcgcccctcactgatggctttagaacgtgggtgggggaaggtgtgtgaggacgggaagacgccgcactcacctgagttggcgtcctcagagtggccgctgccatcagactctgcgggtagagctgggccgggagcgacgggcgacattggtagggacccggggacagcggtccctatcccaggcctgacgtgggtcccccagggcggcgtcgccaaggcttagacgctttcgtgcaggagggacgacgactcccctcacgccttcgtggccccaactcggcgctctgctatctctgatccggtgaacacacctcagagaagctaaaatggccgccacgaagaggcccccccaaaagtcccgtcctttctttttgtgactctcaaggaaagtcggttttctgagctcttactggcttagtagcgtggcgttcaacgcagagcattctaggtaatgtagttttcatagatcccgaggtgggtgccggggaccctttgcaccaacctcttggagtaaaagcgaagctccagggcgctgggcgatgagaaatggcttatccaagtcctagggcagtggagggacttcgccctttcttaaatgggtcgtaatcagacagcatattagaggtgccatctgcaactgatcacccaagtgtttggggaatattatttcaaacttcataaagttcagcaggctcccagaggctaaaattattatcagacgctccctaaggctgccaatccaaatatgtacatcattccatagagccattcagacacgaaatatatccactagtagggaagctaataaacattaccatataagtttattcctttttttttttttttaagacaaagtttccctctgtcccccaggctggagtgcagcggcgccatctgggatcactgcaacctccgcctcccgggttaatcgattctcgtgcctcaaccttccaagtagctgggactataggcgcgcgccaccacgccaggctaattttttgtattttcagtagagacagggtttcactatggtggtcccaaattcctggccccaggtgatctgcccgcctcggcctctcaaagtgctgggattacaggcgtaagccaccgtacccagcctctatcatattacatttcaaatgtatgcactccgaagcattgaagtcagtctgtgcacttttggtcagggacaggtgaaaaactacttcagatagtggcatgatagtgcttctagaagatagaagagaaatgttagatcaccttgaaacagtagtacaaaggtagaattctgtctgattccaacagaaaacatcttttgcctgcatagtcaattattgtgtccaattactgtgtccagtcaataactgtgtccaattcactgagcaacgcttttatccatttcataattcttacttgatatctgagatatattccttctagaagtctaacatcaatctcaaaaaacaatgaaagaaatgctactttgataagagacaaaggggagaggtgggacttcttaatcagaaagccggtgaaatgcacttgaaggaagtgagaaatgagccatgtgggtatttttagaataaattccaggcagaagaagcaggttactagagtgcctggatggatggagacttcacagggcatttcagcattggagggcctagggctccaacccagcaggccttcatctgctttgctggctgcagagacactcagggtatataggtgagaaatctcttcttttttttttttctttttttttgagatggagtttcactcttattgcccaggctggagtgcaatgacgcagtcttgtttcactgcaacctctccacctcctgggttcaagcgattatcttgcctcagcctcccaagtagctgggactacaggcgcacgccatgacacccagctaatttttgtatttttagaagagacggggtttcaccatgttggccaggctggtctcgaaccactgacctcaggtgatccacgcatctcggcttcccaaagtgctgggattacaggcatgagccaccgagcctggccgagaaatctctgctgctttgttataaagttttggagccgcaaaataaatagcactcgaatataaaattttctttttaattctcagcaaggtaatgtacttttttttttttttttttttttgagatggaatcttgctctgtcacccaggttggagtgcagtggcgcgatctcggctcactgcaagctccgcctcccaggttcacgccattctcctgcctcagcctcccgagtagctgggactacagttgcccaccaccatgcctagctaattttttgtatttttagtagagacagggtttcaccatcttggccaggctagtcttgaactcctgacctcatgatccacccacctcggcctctcgaggtgctggaattacaggcgtgagccactgcgtccggccccaacatttattttaatgttcagattctcccagatgtttggacagtgggaactcattaaagctgtgctctctgcttttttatgtcaatattattgataatttcattactttctaatccaaaaatattttcaggctcatgttgtacccttgctatcccagccccagaatcagcctctttttcaaggagctctggttttcttcaatagataacaatgcttgtaaatattagtaagcattagctgtgctcttttctactggtaaatcattgattattaggtcctcttggagagaaagcagatacatacacatgcacgcacacatttttttttttttttttgagacagagtcttgctctgtcgcccaggctggagtgcagtggcacgatctcggctcactgcaagctcagcctccgaggttcacgccattctcctgcctcaggctcctgagtagctgggactacgggcgcctgccaccacgcccggctaattttttgtatatttttagtagagacagagtttcaccgtgttagccaggatggtctcgatctcctgacctcgtgatccgcccgcctcggcttcccaaagtgctgggattacaggcgtgagccaccgtgcccggccacttgcacacatttctatacaaatttatttctacatctatatttacatctgcaaagacttgaaaaattcagatatttgaaatgactcatgggactgaaagcactctctcataaggcttttatttaaatataaagcatacagtacagctagagaaagacagaacaggcatcagggctcagaaagatctggacccatgaccctcaggattcttattcacaagtggacatgcttcatctctggactgtgccactaatatatatgggatggagcttgatttcagaagaattaataacagaaatttccaatagggacttttatgtccctctggctgcatgacccaagccaacctagccatttatgccaggtaaaagccagctgtaaagacacgaaaaaatttcagagtttaagcagcacattgtaactcccactgcctttctttgctaaaagtcaaactaggtatccagatgtccccagagataagcataaaattgtcctattccagctataaagtgttatctgttctccacagtcatccctttgttggctgggtatttttaattacaaatcactccttcttaatattaccctacatcattttcactatttatagaacagaacaagcaaaaagggcagctgtcaaaatactttgtgtgcattatttgagaagtgggtattgcttcaaaatatttcagaaaatgaaatagcccagcacaaaggttcataatcatgcacaagattggctactattttacctccttccatcatcaactttaataacagtatcaatagacccattcaattcaaagttaattctagttcctctcctagccaatattttccacggatagaacatcttgtggttgttttaattcaatttctcacttcattttataatctgtatcagtcttatcataagctttgtttgaaatgtgttagtcaatttgtgatgccataaaggaatatctgagattgggtaatttatttaaaaaaaaaaaagagggagatgtatttggctcacagttctgcagacagtacatgaaggaaagtgccagtatctgcttttggtgagggcctcaggaagcttacaattttggcaaaaagtgaaggagagccagcgtgtcacatggtgagggagggagcaagagaggtaggcaggaggggccaggcttttctaaacaaccagatcttgcatgaactcagtgagaactcactcactaccatgaggacagcaccaacccattcatgagggatccacccccatgacccaaagacctctgactaggcccacctccaacgttgaaggtcacatttcaacatgagatttgcaaggaacttacatccaaaccatatcagaacacatcaaattaattttaccagatataccagtattacaccaaatagcagataacattatgagtctgatcatgatcattacaaaataagtcaaaattacagtatattctccacctttccttcaaattggggttcttgcccgtataccaaatatatatgttttttagacataggttctcactgtcacctaggctggagtgtagtggcaccatcatggttcactgcagcctcgagctcctgggatcaactgatcctcccacctcagcctcccaagtagcagctcatataccacatattgtcctacaaaagggtttaaatccagggccaagtatcatccagagaatttatttttatttatttatttgactctcgttttgtcacccaggctggagtacagtggcacgatctcaactcactgcaacctctgcctcctgcgttcaagtgattctcttgcctccaccttgagtagctgggattacaggcacccaccaccatgtctggctaatatttgtatttttttttagtagagacggggtttcaccatgatgtccaggctggtctcgaactcctgacttcaagtgatccaccagcctcagcctcccaaagtgctgggattacaggtataagccaccatgttcagcccatccagagaatttaaatgttcttctgagggcagagtaaatgcatattggggactatccctaatgaatgaaaattggctttggcttcctaatggaaaagaaggcatgagccaaatctagtacagaatactgatctctctgagcttgcagcacagctttagttgttgatgccatatcagatatagctgatcaaatggggtgacatcaatttatcaagtcttccgtaatctatagttaatttaccagatccatcagcttttcttccaggccatcctagaccgaggctggagtgcagtggtgcaaacatggctcactgcatcctcaaactcctggccttgagtgatcctcccctcagcctcctgaatagttaagactacaagcatgttccaccacactcagctaatacgttttcaaattttttgtagagaggaggtctcactatgttgcccaagctggtctcaaactgctgggctcaagtaatcctcctgccctggcctcccaaagtgttgggattagaggtgtgagccaccgcacccagcccatcctagactactaaatagggaattttagtaatatacctgcatctaaaagatccttaattcaagtcaacatttatttcccccaggaattctatggtgttataatcacttgagtgagcttagctgattctaaagattccatctagcatgctcaattaacacaggactaaaagcagatttacatggcatcctatcaattccaataatgccttgtggtaatggtgaagcaaaaatcatacataatttctgtccataaatgcctctatagaccatatttctccagctgcaagccttctctagctgtatcactatgttcgtgtaattgtatttccttttaagtttacattagctaactaagttatagcgacatcgatcatcaattgtagtaaagttttctcactgcctgcagaccatttacttcattccaatgaaagtgaacttgaagtcccagctagaggtcatgagaccctaacaaggtcatgagatccattgtcaaaggaaattaaattttgggaccccaaacccatttagccaaggggaaaagtcaagctgggaactgggtcatgcaaacttgcctctaccttttggttcctaaataaaatggctgcaagatgaaaagctacccactttccccatattttacccacaaggaaattactggtgagctgttaaaacttcaccatggtggccaggcgtggtggctcacgcctgtaagcccaacactttgggaggccaaggcggctggatcacgaggtcaggagttcaagaccagcctggccaagatggtgaaaccccatctctactaaaaaaaaaaaaaaaaaaaaaaaaatacaaaaattagccaggtgtggtggcaggtgcctataatcccagctactcgggaggctgagacaggagaatcacttgaacccaagggacagaggttacagtgagccgagatcatgccaccgcactccagcctgggcgacagaagtgaaactccatctaaaaacaaaaaaaaaaaaaaaaagaaacaaacaaaaaacttcaccatggaaatgcaaactgatagtttatctttacaggtgcggtcaccccagcctgtcagacacaaaatgcctaccccatttcctctgtgttatcttatgtaaaatgcagattccccacatctttcttttgcccccttttttaatgtgaaaactgtgtgcttctcaatatcccaccctttcctctttaaatttggagccctaaaaatcatcttcagagaaaagcatagacttgtctcccgggtgggtcgttaactttggcaaataagtctccaaaatgattgagacttgtcttgtcattttcttcaattgacatcatcattcagtcataatactccccatttctctccctggttataatcagagcaggctctgaagagattatacttgtcacctttttataattttgacattttgaaaaattatcaagactagggtgaattaattagttccagatctttcagtagaccagttatttttacagggattcaatatttttagtaactactccatcttcctttcttgtttaaggtcatttttgatcaaccatctaaacatttttatccaattctgttttcctgaggtttcttccatctctttttatttatttatgtatgtatttatttatttattttgagatggaatttcactcttgttgcccaggctggaatgcaatggtgcaatctcggctcatcgcaacctctgcctcctaggttcaagcaattctcctgcctcagcctcctgagtagctaggattacaggcacgcgccacaatgctcggctaatttttttgtatttttagtagagatggggttttaccatgttggtcaggctggtctccaactcctgacctcaggtgatctgcccacctcaccctcccaaagtgctgggattacaggcatgagccaccgcgccaggctatctcatctcttttatttttagttacttttcttctgaatgattcttacttttccctccccctccagtattaagtcttattcaagacagctcaataaggaggtccataacatcaagcctcatatcatgttgcctccccttttaccatgacatcaattagctgggtctgcaggatggagttaggaaaaggtatggtagtgtacttaactacaggctagaatctacagctggtatagtttagatgtgtgtcccttccaaatctcatgttgaaatgtgacctccagtgttggaggtgggcctaatgggaggtgtttgggtgttttgcaggacatttagttatcccctccgacccacagactccaggtcctacttatattcttcctcctgtttgtgagtgaatcacataacttgtgcaatctcaatccaaggactggaagccaacctattcacaaaaaatcttcctcaccagcctctaccatatttcattctgcccaataactccttagccattattatttaaaatggactcagagatcatagcaaatatcccattttcatcaccaaatgaaaaaatttcaaaaatgtaattgaaaatactcacaaaactccacagagaatactcgcgtgaggttttgttaaggcaaaggatatggtgcagcaagagaaagaatgcgtgcccatatgctatgtcagacacaaatccaggcagttttccagactcccattcatacactgatatgattcacttccagatcaagccaccaatatctgagagagaaatgctggcttcaggagagctcaagtcagaggatcccagcagggattttatacccttctggggtaacacagttgagccagagtgcctacctaatcatgtatgccaaccagaaaccatcagcagtcaaacttgccctccatattgtcatgggatcttccagatgttaaacaataataataaagctcactgcatttaaatgtcaaaatgagatacctaaagtccctacagacaaaactagagcttttccagtccaattttaaactaattccatctcacacaaaacaagtgcacactatatcaaaatttgggggatactgctaaagcagtacttacagggaaatttatagcctatattattatacaagaagagagttcacaaataaatgacagttcattttaagaaattaggaaaaccagccaggcatgctggctcatgcctgtaatcccagtgctttgggatcacttgaagccaggagttcaagaccagcttgagcaatacagtgagactccatctccaaaaacaaaaacaaacaaaaaagttagccaggtgtgatggcacatgcctgtaatcgcagctacttaggaggctgaggattacttgagcccaagagttcaaggttacagtaagctatcatagtgccactgcattctatcctgggttgacagagagagaccctgtctcaaaacaaaaaagaaaactgggaaaacacagacaaatcctataggcaaccctatatagactctatcctctcttgcctcttgcttcaggagcagccctgcctcagtgacagcaaaaagtggcaaccaagaaagctatttccacatgattcaccaggaacactggctaagttgcaaagccatgtccctgaaatgctagatcttccttctttcaatcttggttttcctacccacttacacacccagcaatggtctttttttttttcttttttttttttttttgagacagagtctcgttctgtcacccaggctggagtgcagtggtgcgatctcggctcactgcaagctccgcctcctgggttcatgccattctcctgcctcagcctcccaagtagctgggactacagatgcccaccaccacgcctggctaattttttgtatttttagtagagacggggcttcaccgtgttagccgggatggtttcaatatcctgacctcgtgatccgcccgcctcagcctcctaaagtgctgggattacaggcgtgagccactgcacccagccccagcagtggtcttgagttgagccatctagagtctatgggaatccacaaaatgtttagatttgccctgggagtgatgctgaccacaaaagagacatagctgtggaagttctgaaactttctgtatactctcatcctatatagccatagtatgggaacatctgagcatgtacctttagaagtggcacatcccaggccaggtgcgtggctcacgcctgtaatcccaggactcgggaggccgaggcaggcggatcacctgaggtcgggagtttgagaccagcctgaccaacatggagaaaccctgtctctactaaaaatacaaaattagggctgggcgcagtggctcacgcccgtaatcccagcactttgggaggccaaggcgggcggatcacgaggtcaggagatcgagaccatcctggctaacatggtgaaactccgtctctactaaaaaatacaaaagaattagccgggtgtggtggcgggcacctttagtcccagctactcgggaggtggaggcaggagaatggcaagaacctgggaggtggagcttgcagtgagccaagattgcaccactgcactcctgcctgggcaacagagccagactccgtctcaaaaaaaaaaaaaaaaatacaaaattagccgggcataggtgatgcatgcctataatcccagctactcaggaggctgaggcaggacagtcacttgaacccagtaggtggaggttgcagtgagccaagatcacgccattgcactccagcctaggcaacaagaatgaaactccatctcaaaaaaaagaagtggcacatcccttgtagtgtgccgcaatctcctcaactccctattagtcatacccagtgtttctataccaattataattaccacctggctcctagaggtcctccagacaaggacacctgcctattaaattctgaacacagactccttgacaagaagcaggggccagcttcccaataagtgcttggaaatatggaacactggatgggaaccagtgaccaaactcatgctcccaggtgctctagaagttgttacaactgatctctcttcatggttacctccaaacctacagtaaaactggcatccaggtcacatgatttgtctcccaaagccctgcagtctgtcttagaagggcttgaacagcaacacaaattaggtcaaagctgtaatcagagctgttctctgccatttgctctaagggacagaaaacaaggactcccacaaaagctgttaacttgttcatgctgagaacacacctgtttcctcaatagactccaaacaataaacagaacccacaacattaatggtggcttaaagaacaggcctttattatcatgagcaatgtgaagcaggcagttccagagctgggtgacttggatattggatatatccataacgagcatcatatgaaatcaatcaacacaggtaagtctctgcaggctatttgcagaatccttctgtgtcctcttgaacaaagctgattatttccatgccatttacatcaaaagagaggaaattaagacccctagtgggctgtgagaccactcacaacaccttttagggactggggagagaagagaggtctgcccgtcacaagcatgctggggtaaatggtaaacgcagtatgattctgccagatggtaggagcagatggctcctgccccagcaaaggccaatagccatttaaaaagtgcaacacagctgctgaaagcatctcacatacttgacactcacagggaatctccccagtgggaatgtccatatctatgaagtttcacttcttactgatggttccctcccaatggctgctcccagagttccactctagggtgagctgttgggctgaacagagacagcacattgcttagactgctaaggcctgtgtccggtgtgaaattcccaatggcgggtaaggttcagcctccaggggaaggctttcctgcatctgctgcactcattaactactgctagttccccaccatatagtaagtcaggggcattggcctaagactttcccccacatttgctacactcttaaagcttttctccagcatgaaccctctggtgcagaacaagtgtctgtttccggatgaattctctcccgcactcactacacacataaggcctttccccagtgtggactttccagtgcctgatgaggttgggtctttgagtgaaggctttcccgcacttgctgcactcataaggcttttctccagagtgaactttctggtgctgaatgagtttggagatgcagctgaaagctttaccacatctgctacactcataatcactgctgtgaattctccagtgtacattaaggtgggagctttggctaaaggccttcccacattcactgcactcataaggcctttctccagtgtgagttcgttggtgcagaacaagtgtgtgtttccgactgaactctttcccacattcgctgcatacataaggcctggctcctgtgtgaacttcctggtgtcgaatgagattagacttactgctaaaaaatttcccacatttgccacactgatagagtctttcacccgtgtgaactcgcctgtgctcaatcaggccggagatttgtctaaagaatttcccacattcgctgcactcgtatggcctttctccagtgtgaactgtctggtgtttaaagaggtcatagctttggctgaagaatttcccacattcgttacactcataaggcctttctccagtgtggattctctgatgccgagcaagtgtgtctttgcgggtgaaggctttcccacattcaccacacctgtgatacctctgtcccatgagaaagccactcacaagcttagtgctcttgtggggcttcatgctgctgagagaggcctgatgctgaagaaggccagatgtggctgaaaagtctctcctacctttcccacatgtgagggtcttctctggcacatggactctgcagcttttcacagagtctctgccctccttccttgggaaaagtttccctccattgggctggttctggtgctggtcaaagtctgtactgaaccagaattgctttccacatgccccacacaagtatggtttctgcctggcttttcccccatggtatttagccaggtgtaaggtatctttcaatattgggccacatatgtcacatgggtgagactccagctctgccatgagagtcctgacctctgacactcctgctacaaaaatgctctgctcagaagatacctcttcatcctccactccatgccaacaacctgaagaacacacaaatgctgattaaatgcatatttacgggtgggaaggggcaacctcattgtatatgtgcatttgacacatgcaggaataagttcatgaaactgttttcagaatgagaggcatggtcagagtgaggaaggaatggctttgaggtagtgagcctctggaggtcataccatgggggagtgccaatgaagggccaggatataagaatggaaccaaacaaatggcttccagtagggccttgactgttagtgactcgtgagtgctatgaaaaatgtatccagtcccaggaaaatccaactacaagtgagcagctggtgttcaaagactatttaagaatatatgcacatcttgtgaacattaattgcaggtcaatactgccaaaaaatgtagacagagaagtggtgaaacatgggtgtaaggtgaaggccagaggtgagggtggcaaggggctaacaaactagaaatgatatatcttcgtgtcaagaacaggaaaggacagatagaaacgctgtgtggccactggccctggaaacaaacactgatgtgaacagttaatgttgccagttttgaacccagctttgacatcgtgcccttccccgatgtccactcaccaggtctaagtcccctctgggcctctctttctgtggctgaagtcatatccacctggtcatacacccagggctcttctcctcgctctagtttcatgactgcacgtgatctggaaaatgcaattcctaagggaaagtcagaacaggtgagcagccagcactggcccatggcaaaccaccctatgatggacttcaggtaagaaaaataacctgggaggagttgtgcaggaataacccaaaggtccctataagtgactatgtaagtgcctataactcctgacaaggtcaggccctagaagatgtcacctgagctgggcgcagtggctcacacctgtaatctaacactttcagaagtcaagtcagggtattacttgagctcaggagttcaagaccagcctgggcaacatggcaaaaccacatctctacagaaaaattagctgggcgtggtggtgtgtgtctgtagtcccaactattcaggaggctgagatgagaggatggcttgagcctgggaggtagaggttgcaatgagctgagatcatgccactgcactccagcttgggcaacagagccagaccctgactcaaaaaaaaaaagaaaagaaaatgtcacctggagaaagggacagaaccttgggcacagaggcatcataattttggacagagtcaccagtacagaaagcgaacagacctagtgagatccactgggcaaaccacaagtctcatgaccccaaacccttggctgcacggcttcaggactactcagcaagtagggaggacactccatacagcttagccctggcatcttgagcacctactccaggaaactggtgaaggaagcggtgctcatgatcccaccataggaagaacagagtggtaaaggcagaaaagcatgaggaccttacccagtgaggctaaaagtgcaaagttctccagcatcacatcatggtacaaaagtctctgagcatcatcaagaagctcccattcttcccgagagaagtatacaaacacatcctcaaagaccacacagccctgcaacaaaagggacaggaaggaccataaaaagtctcttgaccaatgatccccagtctacctacccacaacatcctgctaactaacctcccaggttcccaagtcagagataccaggcactagtaccactgatcctcactctctcctgatcaccccagcaatcactgtgtcagcccaccacaacaacagacaggctgacagataaatgccatttacactctgagccagccaactcccctggggtacccaagatcacaaatcccaggtatgaacctaggctcatttttctcagttaagccccaagtcacaggaccgtcagctcacactccctcctctcatacacatcactctggactatgtctccctcacatctccagcttcccccccaccctactggcccaccccatctccctggactccccaaatgtcactctacacatagcattaagagtgcttgccgaaggcagatcacgaggtcaagagagcgagactatcctggccaacatggtgaaaccccgtctctactaaaaaaaaaaaaaaaaaaaatacaaaaattagctgggcatggtggtgtgtgcctgtagtcccagctacttgggaggctgaggaaggagaactgcttgaacctgggaggcagaggttgcagtgagctgagatcatgctactacactccagtctggcgacagagtgagactccatctcaaaaaaaaaaaaaaaaagtgcttgccaacaatcagtatcccatcttgctccaaaccatcaatggccccattgccaaggaaagccctattgttgctctgaaagcctcccaatctggccctgttccttttttcaatcacaggcacctcaaaccacatgcagatctcaggtatcctcaaccctcttccatttctttgttgcacattgtaccactgtttgatatggattggatgtgtatcccctacaaatctcatgttgaaatgcaacccctagtgctggaggcccagggaagccaaaagattggacacccctgatttaaagtgagagatgtgtaactactcctttaacttgaactcttagaggccactgtagggttattaactgacctgatttcaatattgctgtgtgtcagggaataggaacgcttaaagagagggagaaggatggggatcagctggtcagtgaggcagtcagaagacacataacaatttttttttttttttttagacagattcttgcactgttgcccaggctggagtgcagtggcacgatcttggctcactgcaagctccatctcccaggttcacaccattctcctgcctcagcctcccgagtagccgggactacaggcgcccaccaccatgcccggctaattttttgtattttcagtagagacaaggtttcaccatgttagccaggatggtcttgatctcctgacctcgtgatccacccgcctcggcctcccaaagtgctgggattacaggtgtgagccactgcgcctggccgactttaggcatttgacacagatctctaactaacttaatgcaggcagcaggagataaatacccatgctcagctgcatcatgaaaacggaagaaactggaacacattcaacaccctcaacacattccagctacatcaaaagagtctggttcctaccttctggccttaggataatgacagaatgtagtacatcctaagttccagagagttaccaaaaacagagacagcattctggacaaacacaaagattagagaagcaccttaaatctttggccagatggattcgtgagatccttctactacactaggcaagactgggagaagtagtgaacttttttttttttttgaaatggggtctcagccaagcatgatgactcacacctgtaatcccagcactttgggaggccgaggcgggtggatctcctgagggcaggagttcgagaccagcctggccaacatcgtgaaaccccgtctctaccaaaaatacaaacaaattagctgggcgtggtggcgggtgcctgtaattccagctactcaggaggcagacaagagaattgcttgaacccagaaggcagaggttgcggtgagccgagattgtgccactgcactccagcctaggaaacgtggtgaaaccccgtctctactaaaaatggaaaaattagcggggtgtggtggtgggcacctgtaatcccagctactcgggaggctgaggtaggagaactgcttgaacccaggagacaggttgcagtgagccgagatcgcgccactgcactccagcctgggtgacaagagcaagactccatctcaaaaaaacaaaacaaaacaaaacctggccaaggcatggtggctcactcttgtaatcccagcactttgggaggccgaagggagtggatcaactgaggtcacgagtttgagaccagcctggccaacatggtgaaactctatctaataaaatacaaaaattagctgggcatggtgatgcatgcctgtaatcccagctactgggaaaactgaggcaggagaatcacttgaatctgggaggcagaagctgcagtgagccaagatcgcaccattgcactccagcctgggtgacagagcgagactcgtctccaaaaaaaaaataaataaataaaataaaaccaaagccaagtgcagtggctcacaactgtaatccaaacactttggaaggctggggccggtggatcagttgaggtcgggagttcaagaccacctgggccaacacggtgaacgtcccccccactcccccgcccccaccccacccctcccacctccccaccccaccccacccctcccacctccccacccccgtctctactataaatactaaaattagccaggggtggttgtgggcacctgtaatctcaactacttgggaggctgaggcgggagaatctcttgaacccgggaggtagaggttgcaataagccactgcatcccaccctgggcgacagagtgagacttcgtctcaaaaaaaataaaaaaaataaataaactaaaactaaaagaaaacacacaaaatgagggtgagataatcagatagtagcaatagcacaccacccatcgttgccatcccaggccaaactcctcataccctacagctctctcctcctgcaaacactgaaaagaaccctttcaaatggcaggacccttctcttctggggggagtctcaagaatgcccactccctcttccctgccctgcagtcccagccttctcatctcttaccccagagatatgaaataacatacttaagactgccccacttaaatctgacctcctggccttgacctactccagaccgctcccttcaccccaaagatattctaagcccagccccttccccacaacttcagaccttcctctctagttgcctaagtgaggaagcctccactctgagacatctcaaagtcaccattccaaaatccaaacgttcatggaaaaacaacaaaaacaccttgctctttcatgccttactttcagtcatagctgcatatgatggagcagaaaatcctgttggtttcaaatttaaaacctacccagaatatgatcacttctacccactcacctgccattactcttggtacatccaccaccaaagcattcctggaatccactgcagtagcctccttaccggtctcctcgtatccatcctcgcagtccccaccccaaactaatgttctcccctgagcaaatttcgagacacttaaaatcccagctaagatcacgtccttctattcaaaaccctcagttaatctcaacgccctcagaatgaagcgacaacttctcagcctgccattccagtcacagttcctcaaactctgctctgtgttgatgagaaccctgtctcccaaatgtttgggggtcagcagcacccccgagcctttacctgcgccgtcccctccgcccgtaactctcccacacccacccacaccgagataggaccccgccccaagagtgcgtcgctgtcctgggacacaggggctgcaggcactttacgattcggagtcggagaaagggtgactgagggcccggaggacgcagcacccacccgcgcggagtccgttagctccgccataggaccgtgggcgcggacagctgccgggagcggcaggcgtctcgatcggggacgcaggcacttccgtccctgcagagcatcagacgcgtctcgggacactggggacaacatctcctccgcgctttcccaacacctccacctgcggcccacacaagcgttacagaaccccggccagggacagcctgacagaaacaaaatgtccgctacaaggaggagccggaagtcccgcccacgcaccccccgcaggcactgaaacacccctctcctgggccctcattgggtatgcaacgtataggtttgtgggtagagtgtggttcccactgagctatccttcaaggcaggggattctcggcctgggctcttgggaaaactcgaagtaggagggccaagttgtttgggaaaagtaacccgagtttcaaagggctgacaggacttccgtcctcttttttttttttttttttttttttgagacagagtctcgctctgtctcccaggctgcagtgcagtggcgcgatctcggctgactgcaacctccgcctcccgggttcaagcgattctcctgcctcagcctcccaagtaattgggactacaggggcccgccaccacgccaggctaattttagtacttttagcagagtacgggatttcaccatgttggccaggctggtctcgaactcctgactttgtgatttgcctgcttcggcctcccaaagtgctgggattacaggagtgagccatggtgcccggctgacttctgtcctcttaaaaggcctggacctagattccctggagtgtagtatgcaccgatcgcagaaatgttgagacatttcagatgttccccaaagctgcaaaactaaatagatacaccacaccacaatgtctctttgcgtacactcacagctagaagctaataactattaccttgttgctttttaaatatgtgtgcactcaagctttacagtaacttttgtgagcttcagtttggtcagagacggaagagaaaatattccaaacaaggccttggagtggaagaaggaagagggatgatgtggagtctccctgaaaccagtggacagatttcttcagaaaactcttcctgcctgggtaatcagtgatgtctccatcacagcaaaacacagtgcaattaccatttaacctgtcattgtcattgtaagtatggtgtctgtgttaggaggtgagattatccccgggggaaaaatcctgacagctattaataatgattccgtagttatttgaagataatgaaagaaattgctctaaggaaatatctgtgatagatggacaaagttaagatctcagtaaagtttgagcctgaatactaaagtataagtgaaagaatgaagttaagcatatggttgtgttgtgatcttgaccacactttgtcaacaaaatgtgactcttttttcctgaaaatgctgagcaattgtaaagaagatatcagaatggtaaaaatcaacagtgaagttgtgctgtcttgataattcactgttaaaatacacatccaaggaacacatacgagctctcagtaggtgtttttcaaatgtgttagtagcatgaaagacatcactaataaaatttccaagattcctatacatacaggacatgtcctgcatataatgatttttgtcctgcatcaccttttgactttgtcacaataccctaaataaatattctaaagaaggcaacagtcttaaagaaaagaattttcaacccggaatttcatatccagccaaactaagcttcataagtgaaggagaaataaaatactttacagacaagcaaatgctgagagattttgtcaccaccaggcctgccctaaaagagctcctgaaggaagcactaaacatggaaaggaacaactggtaccagccactgcaaaaacatgccaaattgtaaagaccatcaaggctaggaagaaactgcatcaactaatgagcaaaataaccagctaacatcataatgacaggatcaaattcacacataacaatactaaccttaaatgtaaatgggctcaatgctccaattaaaaggcacagactggcaaattggataaacagtcaagacccatctgtgtgctgtattcaggaaacccatctcacatgcagagacacacataggctcaaaataaagggatggaggaagatctaccaagcaaatggaaaacaaaaaaaggcaggggttgcaatactactctcggataaaacagactttaaaccaacaaagatcaaaagagacaaagaaggccattacataatggtaaagggatcaattcaacaagaagaactaactatcctaaatatatatgcacccaatacgggagcacccagattcataaagcgagtccttagtgacctacaaagagacttaaactcccacacaataataatgggagactttaacaccccactgtcaacattagacggatcaacaagacagaaagttaacaaggatatcgaggaattgaactcagctctgcaccaagcggacctaatagacatctacagaactctccaccccaaatcaacagaatatacattttttttcagcaccacactacacctattccaaaattgaccacatagttggaagtaaagcactcctccgcaaatgtaaaagaacagaaattataacaaactgtctctcagaccacagtgcaatcaaactagaactcaggattaagaaactcattcaaaaccacttaactacatggaaactgaacaacctgctcctgaatgactactaggtacataacgaaatgaaggcagaaataaagatgttctttgaaaccaacgataacaaagacacaacataccacaatcctgggacacgtccaaagcagtgtgtagagggaaatttatagcactaaatgcccaccagagaaagcaggaaagatctaaaattgacaccctaacatccaattaaaagaactagagaagcaagagcaaacacattcaaaagctagcagaaggcaagaaataactaagatcagagcagaactgaaggaaatagagacacaaaaaacccttcaaaaaatcaatgaatccaggagctggttttttgaaaagatcaacaaaattgatagaccactagcacgactaataaagaagaaaagagagaagaatcaaatagatgcaataaaaaaagacaaaggggataacagcacccatcccacagaaatacaaactaccatcagagaatactataaacacctctacgcaaataaactagaaaatctagaagaaatggacaaattcctcgacacatacactctcccaagactaaaccaggaagaagttgaatctctgaatagaccaggctctgaaattgaggcaataattaatagcttaccaaccaaaaaaagtccaggaccagatggattcacagccgaattctaccagaggtacaaggaggagctggtgccattccttctgaaactattccaatcaatagaaaaagagggaatcctccctaactcattttatgaggccagcatcatcctgataccaaagcctggcagagatgcaacaaaaaaagagaattttagaccaatatccttgattaacattgatgcaaaaatcctcaataaaatactggcaaaccgaatccagcaacacatcaaaaagcttatccaccatgatcaagtgggcttcatcccaggggtgcaagggtggttcaacatacgaaaatcaataaacgtaatccagcatataaacagaaccaaagacaaaaaccacaggattatctcaatggatgcagaaaaggcctttgacagaattcaacaacccttcatgctaaaaactctcaataaattagatattgatggtaacgtatctcaaaataataagagctatctatgacaaacccacagccaatatcatactgaatggacaaaaactggaagcactccctttgaaaactggcacaagacagggatgccctctctcaccactcctattcaacatagtgttggaagttctggccagggcaatcaggcaggagaaggaaataaagggcattcaatcaggaaaagaggaagtcaaattgtccctgtttgcagatgacatgattgcatatctagaaaaccccatcgtctcagcccaaaatctccttaagctgataagcaacttcaacaaagtctcaggatacaaaatcaatgtgcaaaaatcacaagcattcttatgcaccaataacagacaaacagaaagccaaatcatgagtgaactcccattcacaattgcttcaaagagaataaaatacctaggaatccaacttacaagggatgtgaaggacctcttcaaggagagctacaaaccactgctcaatgaaataaaagaggatacaaacaaatggaagaacattccatgctcatgggtaggaagaatcaatatcgtgaaaatggccatactgcccaaggtaatttatagattcaatgccatccccatcaagctaccaatgactttcttcacagaattggaaaaaactaccttaaagttcatatggaaccaaaaaagagcccgcattgccaagtcaatcctaagccaaaagaacaaagctggaggcatcatgctacctgacttcaaactatactacaaggctgcagtaaccaaaacagcatggtagtggtaccaaaacagagatatagaccaatggaacagaacagagccctcagaaataatgccgcatatctacaactatctgatctttgacaaacctgaaaaaacaaacaatggggaaaggattccctatttaataaatggtgctgggaaaactggctagccatatgtagaaagctgaaactggatcccttccttacatcttatacaaaaattaattcaagatggattaaagacttaaatgttagacctaaaaccataaaaaccctagaagaaaacctaggtaataccattcaggacataggcatgggcaaggacttcatgtctaaaacaccaaaagcaatggcaacaaaagccaaaattgacaaatgggatctaattaagctaaagcacttctgcacagcaaaagaaaccaccatcagagtgaacaggcaacctacagaatgggagaaaatttttacaacctacttatctgacaaagggctaatatccagaatctacaatgaactcaaacaaatttataagaaaaaaaacaaccccatcaaaaagtgggcaaaggatatgagcagacacttctcaaaagaagatatttatgcagtcgaaaaacacatgaaaaaatgctcatcatcactggccatcagagaaatgcaaaacaaaaccacaatgagataccatctgacaccagttagaatggcgatcattaaaaaatcaggaaacaacaggtgctggagaggatgtggagaaataggaacacttttacattgttggtgggactgtaaactagttcaaccattgtggaagttggtgtggcgattcctcagggatctagaactagaaataccatttgacccagccatcccattactgggtatatacccaaaggattataaatcatgctgctataaagacacatgcacgtgtatgtttattgtggcactattcacaatagcaaaaacttggaaccaacccaaatgtccaacaatgatagactggattaagaaaatgtggcacatatacaccatggaatactatgcagccataaaaaatgatgagttcatgtcctttgtagggacatggatgaagctggaaaccatcattctcagcaaactatcacaaggacaaaaaaccaaacactgcatgttctcactcataggtgggaattgaacaatgagaacacatggacacaggaaggggaacatcacacactggggcttgttgtggggtggggggatgggggagggatagcattaggtgatataactaatgctaaatgatgagttactgggtgcagcacaccaacatggcacatgtatacatatgtaacaaacctgcacgttgtgcccatgtaccctaaaacttaaagtataataataattttaaaaaagtctattcaaagggataatatcgagaatttcccaaagatattaggaaggattatctttccaagagaaagatatcaatattcaagtacaagaaggccgtagaataccaagcagatttaacccaaagaagactacctcaagacatttagtaatcaaattaccaaaggtcaagggtaaagaaaggatcctaaaagcagcaaaagaacagaaacaacacacaaaggagctccaatatgcctggtagaagacttcccagtataaaccttataggccaggagagagtggcatgatggatttaaagtgctgaaggaaaaaacttttatcctagaatagtgtatttgctgaaagtatccttcaaacatgaaagagaaataaaaactcttctggatgaacaaaagctgaaagatttttgtcaacaccagacttgtcttacaagaaatgttaaagggagttctgcaatctaaaaggatgttaatgagcaacaagaaatcatctgaaggcacgaaactcactggtaatagtaactacacagaaaaaaaaaacaatatagtagcaatgtaactgtgatgtgtaaactcatatcttgagtagaaagactaaaatatgaacctatcaaaaacaattccaacaagttttcaagacatagacagtacaataagatatacatagaaacaaaaaatttaaaagctgggtgacatagttaaagtgtaatgtttttattagtttttctcttgtttgttatttgtttatgggatcagtgttgtcatcagtttaaaataatgggttataagatatagtttaccatggaagcttcatggtaaactaaattcaaaaacctacaacagataccaaaaaattttttaaaaagaaattaaaatatacaaccagagaaaatcaccttcacaataaggaagacaggaaggaaggaaagaaggaagagaagaccaccaaacaacatggcagcagtaaatccttacttattaataaaacattgaatataaatggactaaagtctccaatcaaaacacacagagttgctgaatgaataaaaataaagacccaatgctctattgcatacaagaaacacccttcacctataaagacacacatagattaaaataaaaggatggaaaaagatatttcatgccactggaaacgacgaaatagcaggaataactacatgtatatcagaaaaatagatttcaagagaaaaactgtgaaaagagacaaagtcattatatataatgctaaagggatcaattcagcaagaggacataatctttgtaaatatatatacactcaacactggagcacccagatataaaagtaaatattattagagctaaagagacagatagagtctgacacagtgatagctgaagatgacaacaccccactttcagcattgaacaggccttccagacagaaatggacttaatctgcactatagaacaaatggacctaatagatatttatagaacatttcatccaacagcttcagaatacctattcttctcagcacatggatcattctcaaagaaatactatatgttaggccataaaatatgtcttgaaacttttttaaattgaaataatatcaagtaccttctctgaccacaaggcaataaaagtagaaatcagtaacaagtggactttcaaaatgctacaaacacatggaaattaaacagtcgtcttctgaatgaccagtgggtcaattaagaaattgagaagttgggctgggcatgatggctcacgactgtaatcccagcactttgggaggtggagccaggcggatcacgaggtcaggagttcaagaccagcctgaccgacatgatgaaaccctgtctctactaaaaatacaaaaattagccgggcatggtggcacacacctgtaatcccagctactcaggaggctgaggcaggagaattgcttaaacccaggaggtggaggttgcagtgagtggagattgcgccattgcactccagcttgggagacagagtgagactccatctcaaagagaaaaaaaaaaaagaaagaaattgaaaagttttttgaggccaggcgcattggctcatgcctgtaatcccagcactttgggaggccaaggcaggtggatcacctgaggtcaggagttcgagaccagcctgatcaacaaggtgaaaccatgtctctactaaaaatacaaaaattagtcgggcatggtggcgggcgcctgtagtcctagctactcatgaggctgaggaattgcttgaacccaagaaggtggaggtggcagtgagccgagactgcgccgctgcactccagcctggatgatggagcaagactctgtctcaaaaaaaaaaaaaagaaaagaaaagttttttgaaacaaatgataatagaaacacagcatgccaaaatctgtgggatacagaaaaataagtactaagaagaatgtttatagctataagtgcctacattacaaaagtaaaaaaaaaaactttaaataaacaacctaataatgcatcttaaagaattagagatgctagagcaaaccaaacccaaagtgagtagaagaaaataaatagctgggcgcagtagctcacgcctgcagtcccaacactttgggaggctgaggcaggtggatcaccggaggtcaggagttcgagaccagcctgaccaataaggtgaaattccatctctactaaaaatataaaaattagccagacgtagtggcaggcacctgtagtcccagctactcaggaggctgagacaggagaattgcttgaacccgggaggtggaggttgcagtgagccaagatcacgccactgcactctagcctgggcaacagaacaagactctgtctcaaaaaaaaaaaaaaaaaaaggaaaataaaataataaagattagagcagaaataaatgaaactgaaacaaagaaaacaatacaaatgtgttcaacaaaatgattttttttgtttgtttgttttttgtttgttttttttgaaatggggtcttgctcttatcacccaggctggagtgcaatggcaggatctctgttcactgcaacctctgcctcctgggttcaagcaattctcctgcctcagcctcccaagtagctgggattacaggcacccaccaccatgcccggctaatttttgtatttttaatacagacggggctttgccatgttggtcaggctggtctcgaactcctgacctcgtgatctgtccacctcggcctcccaaagtgctgggattacaggcgtgagccaccacgcccggccgagaaattggttttttgaaaagtaaacaaaataaaaaatcctttagccagactaagaaagataaaccaaataaaatagaagtgagaaagaagactttacagccaatactgcagaaattcaaaggatcattagaggctactatgatcaactgtatgccaaaaattggaaattatagaaaaaatggacaaattcctagacacatataacttaccaagatgaattatgaggaaatccaaaacctgaactgacaaatagcaagcaatgagattgaggctgtaataaaaattttcccagcaaagaaaagcctgggacccaatggcttcactactgaattttaccaaacatttaaagaactaaccccaatcctactcgaactattcccaaaaataagaggaggagaaaatacttctaaattcatcatacaaggttggtattaccctgatactaaaataattttttttctatttccatttcaataagaaataagaaaaagtaaaacaaagacatatttgaacctaatatattcttcagtgatatcattcctttactgtaaggaatactttttttttcttttttctttttttttgagatggagtcttgctctgtcaccaggctggagtgcagtggtgcgatctcggctcactgcaccctcctccgcccaggttcaagtgatttcccctgcctcagcctcccaagtagctgggactacaggagtgcgccaccacgcctggctaatttttttgtattttagtggatactgggtttcaccatgttgactaggatggtctcgatggcctgaccccgtgatccgcccgcctcgggctcccaaagtgctggtattacaggcgtgagccaccacgcctggccggagtacttgtttttcaataccacaggagctatgagctggtcctccattttgtatcaaagaatgtgtccccaggtgacaagatgcagattccaagacattgaatcaatatgatgccaccatcgctttctttctgttctatgacatctttctagtcttaccttactatttccttggctctcagttggtttttcctgagttctcagaaattgaaataatacacactttgtagaaataagaatttcatgttagtcaagtctctaggatagccatgggctccacttaattatctcagaacttacagccccatgtcctctgctcactatccattgagatttatgtgttctcagacttcacagaaacttttctagctacttatgtcattctcagtggtaacttcatttatccacaatattaactaattttctcagtccaagctgttttccagaggtaatctccagtccccatgccgaaactatcattgtacttactgctgaaatgatagttccttcccagcaagaaggtgagattattgtacccagaatcttttctcagggttcaaatatccactttccccatggcaggaatgctgacactccagccacggttttgtaaatgtgaattagtaaataccaactattcccaggtgagtgttgtgggcagcaagctacccaggtgctgaggcaagagaccgagggcatgagccattccagtataataaaatatataaaacaacaagagttatactagatctagatcatagatgtaattatatatgaatatcattaatcattagtttgtagcaattactctttattccagtattataataatactcgctctataatcataacctagaaaaaaccaggccatacagagataggagctgaggggacacagtgagaagtgaccagaagacaagagtgcgagccttctgttatgtccagacagggccaccagagggctccttggtctagcggtgatgccagcatctgggaagtctggtctagcggtagccttagtgtcaaggaaaaacaaccgctacttagcggaccgggaaagggagtctcccttttccccggggggagtttagagaagactctgctcctccgtctcttgtggagggcctgacatcagtcaggcccacccgcagttatccggaggcctaaccatctccctgtgatgctgtgcttcagtggtcacgctcctagtccaccttcatgttccatcctgtacacctggctctgccttctagataacagtagcaaaattagtgaaagtactaaaagtctctgatatgcagaaataatggtgtaagctgtctctctctctccctctctctctctgccttggctgccaggcagagaagggccccgcgtccagtggacacatgacccacatgaccttacctatcattggagatgactcacactctttgccctgcctcttttgctttgtatccaataaataacagtgcagctagacattcagggccactaccagtctccgcgcattggtggtagtggtcccccgggcccagctgccttttctcttatctctttgtcttgtgtctttatttctacactctctcgtcaccgcacacagggagagacccaccgaccctgtggggctggtccctacagagtgttacaatcagaaggaaccagttctgctctgaggttgagacatactctgagggacctggagacatggtgcaacctcctctccttgccttatgcctctcctctatatttcctctgaaaccttctttgaatattcttccttccattactgactgaaaatattaagcctcacaaagtccactgtaagatctttaccagtgggaaatgaagaagactgtttaaagtatttgagtggccatttagtgtctttataacattttttggttatgcatttttgtctttttgggggcatgatttgcaaattgagtctctggtattttactaacttgtgtttgatgagtgaaagagttaatacttcctctcccattagtgaaaggaaagacacttcagaaacatgaataaaagattgtaaattggaaatagtaaggtaatcagatatgtaaagaatctaggccaggcgtggtggctcacgcctgtaatcccagcatgtcaagtgattctcctgcctccacctctctagtagctggaattacaggcacctgccactacgcccagtgaatttttgtatttttagtagagacaaggtttcaccatgttggtcatgctggtctagaactcctgacctctggtgatccacccacctcggcctcccaaagtgctgagattacaggcatgagccacagcgcccagcttcctgacatcgcttaatgcataatctcttcacagggtatttccaaagtccaagggctctttcataacacctacaactggttccatcagaaatgtttaaagcataacaaaatatgttatcatcgtccattttttctattgtctcaaaaatatctttgttctttaagcagcttcattgcaatgaaattcccaaatgtgggcgtggtggctcacgcctgtggtcccagcactttgggaggctgaggcgggtggatcatctgaggttgggattttgagaccagcctggccaacatggtgaaactctgtctctactaaatacaaaaattaaaaaaaaaaaagaaagaaattcccaaatttatccccatgacttttagtagttctgtctcatatatctctattaatctacaggtatgactttcctttttaaaattccttttttgtgcggggtgtgggacagggtcttactctgtcacccaggctggagtgctgtgacacaattacagctaactgcagcctggacctccctgggctaggtgatcctcccacctctgcctcccaagtagctgggactacaggcaagcaccaccatgcctggctaagcttttattttttattttttgtagagactgggtttcacaatgttgcccaggctggtctcagactcctgggctcaagcaatccacctgctttggcctcccaaagtgctgggattacatacataaccacaatgcctggccttaaattttattttatttttttattttttttgagacggagtctctctctgtcacccaggctggagtgcaatggtgcaatcttggctcactgcaacctccgcctctcaggtttaagcagttctctgccacagcctcccaagtagctgggattacaggcgcccaccaccacgcccggctaatttttgtatttttagtagagacggggtttcaccatcttggccaggctggtcttgaactcctgacctcatgatccacccgtcttggcctccaaaagtgctgggattagaggcgtgagccaccgcgcctggccaaaattttatttatttcttgaaattgtgtaatttttgtattagaatttattatactctaattttttgtgcatatctctgatatgatttaagttgtttacacatgtataagccataagcaaactagatattcttgaaatgggtgattcaggggtagtcccacataagtgtgtgattatgacacagccagaaacacacagttggattacattctcccagcatgctgtggtacagtctggaagcaaaaatttcaaagagtgtatgctcctggtgtgtgacaagtgcctgagggttatactgcagcacagcctatagacaaaacacatatcccagggaccctgtgtgacaggtgtgcagtatttaaagacctcagtccggcagggcacggtggctcacgcctgtaatcccaacgctttgggaggccgaggtgggtggatcacgaggtcaagagtttgagaccagcctggccaacatggagaaatcctgtctttactaaaaatacaaaaattagccatgggttgcgctcacctgtagtccgagctatgcgggaggctgatacaggagagttgcttgaaccagggaggcggaggttgcagtgagccaagatcatgccaccacagtccagtctggggaaaagagtgaccctgtctcaaaaaaaaaaaaaaaaatctcagtccatcctagaggtgcccctgttatacctataggactctgtgtaagaggcattgggtactggcacctattgacagcctgagccgacataaatatataccacactgacaacaaacccaagagggagagatgtgatccacacaaccagcatattcagaaccccaaggggctgttagacagaatggaggtggggtcatactggccacacagaagcacaaatgctactcagagacttgggcttttaaatttgctgattacaaaggtttagtgggagcataagcagggtataatcaagaaaattttactccacaatagatagaaatataccttccagtgtgtgtagtcataatataattggaacacacaattttaaacttctagacattactgtagagtcctatgttgattaagaatcatcacagatatttctagaaagaagaaagcaaaatattactgatagtgaagatgaaatatgcctatataacttgctgtcatgcaaggtaacatttaggtattgagattctttacatccctgattacattgccatttgtaatttataatcttttatttacatttctaaagcatcttgcttttatgtgcctatatatcatgctgtcatacaagataacatttagaggccaggcatggtggctcatgcctgtaatcccagaacattgggaggctgaggcaggtggatcacctgagatcaggagtttgagaccagcctgaccaacatggagaagccctgtctctactaaaaatacaaagttagccagctactagggaggctgaggcaggagaatcacttgaatccaggaggcagaggttgcagtgagctgacatggtgctattgcactccagcctgacaacaagagcaagaaactccgtctcaaaaataacaaaaatgagagatatcaggattataagtaaaacagcatagtaatacacttaagaatagataatcggtcagatgtggtggctcatgcctgtaatccctgcactttggagagccgaggtggatggatcacctgaggttgggagttggagaccagcctgacccttttttttttctagtagagacaggagaaaccctatctctactaaaaaaaaaaaaaaaaaaaaaaaaacacacacaaccaaattagccgggcgtggtggcacatgcctataattccatctactcgggaggctgaggcaggagaattgcttgaacctgggaggcagaggttgtgttgagccaggattgtgccatagcacttcacgctgggcagcaagagcaaaactccgtctcaaagaaaaaaaaaaaaaaaaaattagccgggcgtaatggcactgtaatcccagctgcttgggaggctgagccctgagaattgcttgaacccaggaggtggaggttgcagtaagctgagattgcctcactgcactccagcctgggcgacacagcaagactctgtctcaaaaaaaaaaaaaaaaaagccgggcgcagtggctcacgcctgtaatcccagcactttgggaggccgaggcgggcagatcatgaggtcaggagatcgaaaccatctcggctaacacagtgaaaccccatctctactaaaaatacaaaaacttagccgggtgtggtggcgggcgcctgtagtcccagctactcgggaggctgaggagaatggcatgaacccgggaggctgagcttgcagtgagcgaagatcacgccacttcctccagcctgggtcacagagcgagattccgtctcaaaaaaaaaaaaaaaaaaacaaaccaccatgcaatgataaataataatggatcattgaggaagaattcatgggacttcattacatagtcctttgtatttgtgtatatatttggaaaaatccattacaaaaggtacaatatgttcttgcatcaataactttatacaggcatactttggagatagaacaggtcaattttttttttttttttttgagatggagtctcactgtgttgcccaggctggagtgcagtggcgcgatctcggctcactgcaacctccacctcccgggttcaagtaattcttctgcctcagcctcctgagtagctaggattacaggtgcccccacccccgccaccatgcccaggtaatttttgtatttttagtacggacggggtttcaccatgttggccaggctagtctcaaactcctgaccttgtgatctgcctggcttggcctcccaaagtgctgggattacaggcatgagccaccgcgcccggccgacaggcttctttatcccataaatatctctaaatcccatcatcaaagaggcagatttgagaactgttctcccacctctgcacttggcagccttgtaaatacatgctttctctgctgcaagactcatcatctcagtgattggcatactgtgagatggacagaacaggcctggttctatatcaatagtgtggaggaattgtttcattttatagaccagtatcgtcagcttcctcaggaacctttactaacatggatagtgagaataactaacttaggggaaacatctttggttttaaataatgcagagtggaagaacatgtttgggttgatgtagtacctacaggtcactcttcaacaattgcagataggtatgtatcatccacacacacaagagtttattcctgaaggaacagccagcctgggtgggtgtataaaagctactctgaagtctgtctactcggaaaagcgggactgtctgactccccctataaatgccaagtggggctccccagatgaaccagcttaatatgcttcccatgcaagccatgtggaactggcattatgatgataggaatatttacctactgaatatgtttattacccaggtcatggtaaatgtcttggtttggggaaccccattttcttgggcaccttatgtaaacttactgctgcaaaattgagctatagtcagtcttaccaaatttgcttcctattatgggcctttcagatgctaataaaaccattagattaattaataagatagacaatgatgaaaggtacaggggagagtcaaacagctccttccaggaaggtagaaatttttaaatagttataaagaaataagacaaataaagaaaacatggataggaatgaaactaagaggaaaaagaaaagggggaaatcatgatactcatcccagcatggtggaaatctttagatggctattagatggaaattagatgaataaaataaaaactgatcggattaaaacaaaattctgaatataacactattgaaggttgggtggaccaaaggaagttcctgttgatcccccaacattaaagggccttaagctaagttgctgtagttcctgaagtttggataaattttaaaagccagaaggtaaagatataatgagaaaccccacctggaatgcctagggtgatggttagactggttaatcaaggtagcacttggaaaaaaggccaaagtctcctggcctgaaccctgggtggaaacctgaagacatctgcacaagaaagggtaaaatggtctggagagaagagtcctgggactacaacataaagtaaaagttgacaggactatgaaagttggaatgttaaacatgcttttttttttttaagttgtactaccaataaactgagttctttccctactttgtattggtcacaaaaaaaagaacacccaatttgggaaaaaaaaaaaaaaaggcaagcaagttttatttctgagcagaaatggagaatgagtaagctcttgctctaaatgcctcttctccctgaacatagaagacataggttttttaagaactgagcggctgggtacagtggctcatgcctttaatcccagcactttgggaggccgagacaggtggatcacctgaggttgagagttcgagaccagcctgaccaacatggagaaaccccgtctctactaaaaatacaaaattagccaggtatggtggctcatgcctgtaatcccatccataacattaatttattaggcaaaacactccttgccatggaaacagaaataaagaatagtcacaaaaaaaaaaaaagaaaagaaataaataaagtctgttttatctaatacaaaaaaaaaaaaatagccacttcccagcaataacatgaactcctggatttaagacacaaccaatatcaacaggtggagagcatcttctgcatacgtgccccacctttgaaaactgcagccatttatcactaccaaaatagcatttctttcattggtcttcctgtaagattgataaatcttagataaattaatccagaattaattgaatataagttggaatctcaagcgagggatactaagtggataaaagtgttgctcaatgtactggacactatgattgattttataggcaggagagttgtcttctgtgggaatcacagacagagattcagcatgtattcctgctttagggaacacaacatttctcctctatcttccttgtcttgtcctatctggattagttctctcttgtccctgacagactgagaaactgactctaatgcctcagagtgcattcatgtgaatttataacacaataatgtttatcagcctctgctgccagtaccgggattttgcgactgaaagactgttcaaaacgttatgataatttggatttttagtctttgggggcatcctaaataataagtttagcatcggagagctcgagttccccaaaatctaaaataatattttttcaaatacttgagtgatcagttacagacactaatctccaaaaatctcaatacgggttctaaggctaggtgagactatcctctaccctagaaggacatgcactttaaggacaggccgctgagatggagctgggcctttcctgcaagtaagtgaacgtgatggtagggtatacctgacagcatagtttgacaggggatatagactttcaaggagaaaatagacatgaaatagatacatgcagaagtatagtcaaattgagggaagatgacacttaggccagagtagtgtttattcaccactctgtgcaatcaagcgcctctgagaaggccttctttaccgccttggaactgtcttggaacctgaggaaactacataacccagaaatctctgcgtcgaatgacagcgcgtcagagccaatgagggctcaaaataaaggcgtttccgcggaaacagtataaaggtgggacttccggcgtcctctactagtggccattttgattggtgttgggtgtattttccagtgagagaccgcggagtgttgggtcgtgtagaagtgactgaacccagaaggtggagacgagacgttgtcccgactgcacagaggctgctctgcagctccttaaaggcgctaggcgtgacccgcaccaaggccgggatcgggaccaccgtgcccgggtacctgcactgctcgccccctcctttcgaccccgctttccccacccagtcggatggcggcggccgcgctgaggcccccggctcaggtaattgtggcgtcttccgtgccctcaggtcacctcatctttacctaagtccaaaagcagagaggaagcggcgcctgctcaaggttttacaccctgaacccggcgtcgggacactgaggcgctctctatgggcccccgtttttgacacccgcgggatgcgctcaggagagctacaggcacagggagcggtgcaggcaaaggcctggagatgaactgagccgagaggatcgtaacctagggtccacaggcacctgtcgggagcaaagtgtgaggcagagctcctcctggaagagcaggctgaggaccgtgtattcaccctgagaacgctggaagccatggacagcttccaacaaaggaaggaaaagatcaatgtccaggctttaaaggtttcccaaagtccagtcgaaaaagaacacaggggatgacttttgggccctgggaggttgaattcttgttcaacctctacagatcagataggtgctaagagatgacattttgtactgaggcgctcagttcagacaaccaactcgcgtttacctagttacagggccaagaaagagttcagggaggcctgagcttatcaaatctcatcagggatacattcttgtagcttgtgcctctcctctcaggaactcctggctgcagaagcacttgcagaacctccgcagggaagcggagggtgttattccctcactggccctaactcctatccacatgctctttagattgggatgtcctgggattcttaggtacctttttttttttttttttaagttttttgatatgggaaccctggaggaaccttaaacccaggatccaaagtctgtgacacaggatatatggaggtattcccatttctgtcaaccagtataaacatacttggaaggttaacccaggagttagtaccaggatgtgaaatgcttagaggtgaaactgaccagagggaggaggtgatgttgccacagtttcatctggctgtagtctcctctggctgtacagtggagaacagactgtggggttgagagaggaggaaataagatgagagttgaggcttttgccgtaatccaagtgagggttaacagactaagattcatggctaaggagatgtggctggattcaaagttgatattttgttacagcatctaggtttcctaatacacaaagtaagggcatgaagagagcaatcaggatcccgaggtttttggtcttagtagctgtagctatggaagctgcatcagctgagatgagcatgttggtaataaacataattagaatattatgcaaatatcaggatgactgttatggccatatgaagagtcagagacgaataagtgtaggcatcaaatggctatggacatgcaggttggggtatctggaaagggattgacactggagacatctaatatatggtagctaatgtgtatgctatggtgagtgagccatgggtcacattaaggagaacacacttcagattctggtggtaaatcttttaggggaccagaaagcagtggttgaatgatgaggactgcatctgttgcttgggtccctgggtaatgttactgggcttcctaaacactggagaggtaggtaagtgaccatgatggtagggtatacctgtcagcataatttgacaggggacatagactttcaaggagagaatagacatgaaatagatatatgcagaagtgtagtcaaattgagggaagatgacacttaggccagagtggtacttattcaccactctgtgcaatcaagatttgagatgactttggtagtgtgtggggggtttcattacacgtgctgaatatgctcagggagaaatatggtcatctgtgacagtaggtcttgggccttaaatggattaaaaacaggactttttttttttttgagacggtgtctcactctgtcgcccaggctggtgtactggtgtatagtggcgcaatcttggctcattacaacctccacctcccaggttcaagtgattctcctgcctcagcctcccggtagctgagaatacagttgcgtgccaccacgccccactaatttttttttgtatttttagtagagatgtgatttcaccatattggccaggctggtctcgaactcctgacctcatgatccacctgcctcagcctcccaaagtgctaggattacaggtgtgaaccaccatgcccatccaggactgctctttaaatggcaatggtattaggtgaatggaagttggtccgtgttgctgaagggtaagccattgtagcacagaagtggaataagaccatggatatctgaagttacatgtggttttgcatggatgtggagtaatgcaaggaggcattcatagaattattagggactaccactgctaatgggaaccatggtcattttgtgttattattggatcctgtttgaatatgtgaagcatattggatgctgtcagccatattgtggtataaagccaaaaatggaggcccaatatgatgtgtcaccttgacatctagtgatattggtatgacctcaaatgacctgagaaccaattcccttcccactaggctcttttagataataatcagcatggcctaataatccttttattagggagaccaggcagaattcctggttattatactttgtagtgagtttcaattttatccttacccacagtgttattcaaacaagccagttgcatcctcctaagggattcgggggtcatcacaccctcttcattttaaaagcttgcatatcatagtttctggttatgcactcttatccatagtgcaacccctatgtggtccttcatgatgagggatgtcctcttctagactttgagtgtatttgatttttaaacatatttatagcacctgtctagtgtttgatgtcatgtgtttggtcattaatataactgtaaggtgaaaatctcacccttactggtagaaggaagaagagggtataaacatactttaacttgtggggaggcagaggccaatgtgggaggcagtttagtgggggtggccatgggcatgtgtctgtgcagtctaaagaatgatgtgtattttggcctagcacagtggctcatgcctgtaatcccagcacattgggaggctgaggtgggtgaatcacttgagctcaggatttcgagactaacctgggcaacatagtgaaaccttctctctaccaaaaatacaaaaaaaaaaaaaaattagccggcacggtggcatgcacctgtatcccatctactcgggaggctaaggccagagaattactcgagcccagtagacagaggttgcagagagctgagattatgtcattgcactccagcctgggcaacaggagtgaaaccctatctcaaaaaaaaaaaaagcaaaaaaaaggaatgatgtgtatttagagaaggagtatgtctgatagactgaggatgctgcattgggatttacatgacttcatctctaccaggggcattggctatcaggaagttatggaccgctttatatcagcaccaaaacatagaaatctattgtttcacccacttcttgtggctgatggctgtacaccatgaccagtgagcccatgagaagatagtgacaccagtgggcctagtttctccttgtagtttaggaccttgggaggaggaagggcaagggtggataagtggatgagcatatggagtgtttgtggtttcatctgtcatcatcacggcagggcactgtgacctttgaagatgtggctgtgaacttttcccaggaggaatggagtctccttagtgaggctcagagatgcctttatcatgacgtgatgctggagaacctgacacttatatcttctctaggtaaggcactcacactcttctctatgacctcagctattgtctgtctgtccccatcttttttccccatggcaagactgttttcctcacttcaggagcctgggcacaggttcctctgttagttccctgggtaggttctatgtggtatgtaggactgaggtgtgtgcactgccctctctctccttgagcagccccaacacctgctttgctgcaagctcccagagaaggagctttacaggcaccataatgcatcccaccttgcttgccctctggctgttgagtaatttttctagatcagagactggtatgcacaggttctacttccttgctctaggtgacatttattcatgactgcctgtgctaggaattcctcccatcactgatgttctcaatacttacatgcaccataggttgttcttgcaagaccctccttataaattatcttgtttgttttgttttgttctgttttgttttcaaagtcttaactctgtcacccaggctggagtgcagtgctgcagtcatagctcactgtagcctcaatctcccaggctcaagcaatcctccttcctcagcctctagagtaactcggactagaggcttctgccatcacatcccactaatttttatttttatttttaatagagatgaggtctggctgtattgcccaggctggtctctgactcccaacctcacgtgatcctcccacctcatcctcccaaagtgctgggattacaagcatgagccagtgtgccctgagtattttttgcttttttgtttttttttttttcagacagggtttcactgtcatccaggctgcagtctactgatgcaatcatggttcacttcattctcagccttctgggctcaagtaatcctcccacctgactcctaagtagctgggactacaggagcatgccaccctgcccaactaatttttgttcatttgtatttttggttttgttttttttttttttttttttttgagacggagtcttgctctgccaccaggctggagtgcagtggcccaatctcggctcactgcaacctccgcttcccaggttcacaccattctcctgcctcagcctcccgagtagctgggaccacaggcacatgctgccacacctggctaatttttttgtatttttagtagagacggggtttcaccgtgttagccaggatggtctcgatctcctgaccttgtgatccacccgcctcgggctcccggagctgggattacaggcgtgagccaccgtgcccggcctcatttgtttgttttgtagagatggtgtctcattatgttacccaggttggtcttgaactcctagggtcaagtagtccttccagtttggcctcccacagtgctgggattataggtgtgagccactgcacctggccaaaaattatctttgtagtatttagttttctttcctatgggctatcatgtgctgattttttctgaactgttggttggctattcttctctcttgtctttctcttattctttatgtcatccatgtctcatgtaaattccatgtatatctttgcagtgggactgagagttctcagtgatccagaagttgcagctaaacccaggctcagcatgatgggcccagagggaggccacctctgaggagtaacaccctggaggaagacataacattagggatttaggaaagtcatgctagaagctctctgatttcacaagtatttacctggcaacatgacgagccatatgctgtttctgtcttccccattcttgagagtttcagacttcaccgttctataccctgtcacttctcctctgatgccagcccaggactaatcttcacatctctggatcccacctggacccatttttctcacatttccatctgcagtggactccaatactggcatatcaattttgtattaggaagtgtgtacacattgctaagccatacctgaccaacagctgctttgttgtactcgtattttcttgtgacacacaaacaagtgtatctttgttgtactcgtattttcctgtgacacacaaacaagtgtatctaacagaggtattactccatggaaataattgcagaaacagaatgttgcctttaggttgaagataagtcttcttcatattactgggttagaatgattacagaatgtagggggccacatgatgtgaaggagccaacaatacatgcactacaggaagcagaggcaattccttcctgtgcaaacatctaaaggaccttcataaagcatgtgggtgctatataaaaggatatgtctaggcccaagtaaatataagtacaacaaagcagctgttgatcaggtatggcttagtaatacttcccttcggaagtaccttgcattttaccagcattttatttcttttaggttgttggtatggagcaaaagacgagacaccttctaagcagaccctttctatacaacaggagtccccactcaggacacattggacaggtgtatgtaccaagaaggtccacctctggggaatgtgtggccctctcctgggagatatcttacaccagggaacacaacacaatcagaaattgaatgggtttggggcatatgaaaaaaaattggatgacgatgcaaaccatcatcaagaccagaagcagcacattggagagaaatcgtacagaagcaatgccaagggaacatcttttgtaaagaactgtaaattccatatgtcacatgagccatttatctttcatgaggttgggaaagactttttgtccagcttgagattactccaacaagaggacattcacacttcagggaagtcaaactttgaaactaagcatgggataccccttcagggtggaaaaactcattacatctgtggagagtccacaataccgtttagcaacaaacactcacttgtccttcaccagagacttctccctagagaaggaccttatgtatgcagtgattctgggaaattcactagcaaaagtaatagttttaataatcatcagggagttcgcactggaaaaagaccttatcagtgtggacaatgtgatgaatcattttggtataaggcccacctcactgaacaccagagagttcacactggagaaagaccttatgagtgtggagaatgtgataaatcttttagtcataagcacagtcttgttgaccatcagcgagttcacactggagaaagaccttatgaatgtgacgaatgtgggaaatcttttagccataagcgcagccttgttcaccaccagcgagttcacactggagaaagaccttatcagtgtggagaatgtgggaaatcgtttaatcacaagtgcaacctcattcagcatcagcgagttcacactggagaaagaccttttgagtgtacggcatgtgggaagttatttaggagcaactcccacctaaaggaacaccagagagttcacactggagaaagaccctatgagtgtaaagaatgtaggaaatcatttaggtacaagtcacacctcactgaacaccagagagttcacactggagaaaggccatatgagtgtagagaatgtgggaaatgttttcatcaaaagggcagtctcattcaacatcagcagatccactctggagaaaggccacatgagtgtggagaatgtgggaaatgttttcatcaaaagggcagtctcattcgacatcagcagattcactctggagaaaggccacatgagtgtggagaatgtggaaagtgttttcgtcaaaagggaaacctcattaaacatcaacgagttcacacgggagaaagacatcatgaatgttgaaaatttggcagatctgttggtaaaaagagcaccctcattcaacattcgtgagatcacactggaaagcacttatgagtatggagaatgtgcaaaatcatctagccaaaaggttggcctcattcaacaatagcaagatcacactggggaaaggctttctgagtgtagagaatgtatgaaatcctgtacatagaagttttgcctcaccaaataccagaagggtcacactggagaaagaccctatagttatggggaatttgggaaattacctaacaagaagtcccacctcactgaacactactgagttcacagttgagaaaggccatatgactgtaaggaatttgtaaaattatttagccagaagagctgcattactattcatcagataatttacaatggagaaaggccacataataatttctcacataataaatgtgagaaatcatttccgtacagctctgcgctccatgttcgtaagagttcacactggacaaagccttatgagagcagcgagtagaaaatcctttgtgggaaaactctggtttcattaaacacaggagagttcatgctagagaaaggcctcaacagtgtagcaaatatggaaagacattcactagaagctctgccctgcaagttcacactagagaaagcccttctcagtgaagtaaatttggaaaattgattagtcaaacctctatgctccttcaaaatcagagttcacactggatcaaggctttatggtgtgacaaatatggcacattctttatctaaatgtctaacatattatgcacagacaagctcctgctgtggaagtgccttttgagtgcagagcatttgcgagggcttcactcttctttcactggataccagaatgttgacaggagaaaaataacatagatgtgtgggaatattacttcttgtccagtgtaactgtgggagagagcccttatgaggacaccatcaacctatattgaatgtcatatgtccagtagctgcataaattccaggtatatgggagctgtattgcatttcttatcctgcgtatgtccttgccagatttatttcattcttaggtctctggcaaaagccatttcatctctaccacttggcaggtacctacagtgcatcactcatgcactccatcatattccagaaaaaaagttcaagttgtctcccattcagcagtggtatttttgagtagcctctgcactcgttcctttctcatttctctatgaagagttaggccatggacctgactcagttctggcctagagcagaagtgtccaatcttttggctttcctggtccacattggaagaagaattgtcttgtgccgcatatgaaatacattaacactaatgatagctgatgaacttttttaaaaaatcacacaaaaaccctcataatgttttaagaaagtttacaaatttgtgttgggctgcattcaaagctgtcctgagatacatgcggcccacaagctgcgggttggaccagcttggcctagagaatttttctgattacttgacaagatgggctgtctttcctaggaatctcatgattgtcatgattcttaaaatggaattttccagcctcttaactcaccaacccaagtacaagctgcctctcattgttctggtttctgctatgatgaagtccttatttaagcttccttcaatcttgggaattgtattgactgtattgtgtgaattgtatactcactgcattgtgtggcttagatacaacatggttctggtaccatgaaggattctggtaccatgaaagtttgttggggttactaaactgtgtgactcttagggaacagtatgaaggcagaatatagctctgcatttgtggcctagtttggatggctgcctaaggcctccaaataaagacttcagggctttgtgatctttatttttagatgaaatagtgcaataatatgtgttttcataaatcaacctgagtaggggacagttttagtgacacactttggtgcttctgagaacagcacaaaattattctcttgtttataatggatattgcattctgctcagtactggtgagggaaatctgttctcaagtcctacagtgcattcatgtgtcctgaagtccagaattctgtaggatagtgtcctacgttataagcctggagaaagaaatcataattctttaatttttatttttttagggaaatgatgtcactctgaaactcaggctggaatacactggcatggtcatacctcactgcggcctcaaactcctgggctcaagtgatcctcctgcctcagcctcccgagtacctgagattagcccaggtaatttaagaattttttatagagatagggttttgctattttaccctgactgatgttcaactcctggcctcaagtaatcctctagcatacgcccttgaaagcactaggattacaggtgtgagccaccatgcccagcccaaaaataatttttgtagaattagcatttctaggtagtgaagcagactgcaacagaatagttgggatatactttttttaaaaaggcatccacaatgattcagtcactatgtctgtgatggacaagcaggtacagaaattttcaggacctccataattatgaatctagtgtagcttaggtcattgtcagactaaatctaaaggttttgtggatttctgtagcctatctgggctgcataccaaaaagccatccctgaattagtaggaggaagaggatagggagaaaggaaatctcttagtccagtgatgtggcctttgcaaccagccagcattccaatttaatcaggtggaaatgatcttcctggctcataagtatttggtatcacacaggctaattgccccccttagggcgtgatgagagttaggagagtcaatgtaaaatcacataacctatttgtcaaaaataatgttaaatccagatagttctttcaaattaaatttttaaagctgtaataagactgggcatggtgactcatgcctgttatcccaacactttgggagtccagggtgggagtattgcttgaggtaagaagtttgagactagcctgggtcccatagtaagaccctgtctcttaaaaaataaatactatctttctctctggcctctccatgctccagacaatcactgaattacaatatttgcttaacagtagattaatgtcaattttctggaattttatatgactgatataacatgtttcctcttttcatacctgagtactctcctgagccctatttatttagatgttcttcttttttctttattattatttttatttcacatagcagggatgcatattttgacattcatcaatcatgatatatgagtagttcattctttttatcttagaatatgacatgctatggaaatcactgtatacgaattcatctgcttatggatatgttattgcttcttatttttgtctgttaggaataaaactgcttgttaagcacatttgaatgcaattcttcatatagataaggtttcatttctcttgtttgaatgccttggtgtgcagtgcccaactcacatggtagatgaatgtatacccctctcccaactccaggccgcacagcttacagctccaagagagactccttccctccacttgaggagaggagagggaagaataaagaaaactttgtcttggaacttgttccagctcagctacagtaggatagggcaccaggctgaggcccctattctaggccctagctctgaatgacatttctagatataccctgggctagaagagaacccacttctttgaaagggaggatccagtcctgggaggatccatcacctgctgactaaagagtcattgggccctgaataatcagcagtaatacacaggcagtactcaccatgtgccattggtgagactcagacgctggcttcaggtgtgacccagcacattcccagctgtgatggctttcaggaatgactcctgcttgagaaacagaagagtaaagaagactttgtcttaccgcttagataccagtttggccacagtagggtagagcaccaagtaggctcttagggtccctaatttcaggccttggctcttggatggccagaggaaagcccactgccctgaacagtgtcccaagcctggcagcactcaccacaagcctgtgagtcccacagtcctggactggtgaggaccatggggagagacacctctgcttgtgaaaacaggagggaagagtgagaaggattttgtcttatggcttgggtgccagttcacctgcagtagaacaccagatagattcctaaggtttcccactacaggctctggctcgcagatggcttttctgaatgtgcctaggatggggaggagcttgccactctgaagggaaggacataaacctcgctggttttgccccctgctgattgtagagtcctagggccttgaacaaacagggagtagccaggaagtggtcagtatgagccttgggcagcacccagttctctgctggctacaggtctgaccccacatagtcccattggtggtggcacaggggtacttgtgttactgctcctccagctaaaggcagctcagcacaaagaaactttggaaacctgccagcaggagactcaatgacccccatgaacacttgagctggcagggagagctgcttagagaagtggtagggacagaactccagccagtgcagagcccagaggatttggggtgggagcatctctagtggagcacagctagacacgcccatatttcaaggttcgccttgcttccctaacagactttagccctagggaagtcagacctgatcagtgcagggcgttcttgccgataagttggggatggttggacctgagcacctcttggtcagctggcctctcccagggctccaggctacccacacctgcttgcagtgcgacctcggttgcccaggtggggtcccttatgggggtgtacatcatagctcctgtgctggtgaactgcagttgataaatcccatagtcgtgcaacagcccacctgcaccttcccaaaactgcggcctctctgagacactttgcctgcatgcattcacctatggccacccccgacgttgctttgccagcatatgtgcatgcaagtggaccttgccttctcttttccaccagcatgcgtgtgcatgtgcaccctgtcatgctacagctgccagtgtgagcacacctcatccccccaacttttcgctgcaccaccattgctgtcagagcatttgcgatcccagagactgccagcccgcacctgccagcaccccacccctggaccagcacaaaactacacagacgagcagacacactccactcaccagtatcagctgctacccacgtgaatgcatgcacagagggtacaaacagtcctgcacctgccagcaccttgcctccatattaactccactgctggtgtgaatgtgtactgggacatcaatggaacccccttccctacccccccatgttgtgctgccaccaccagcactgtgaacactcacgtggaggctggcacccctacacccaccagcactccatcgcagccaataaacgtacaccccaccactgccattgctgctggcatgtgggaacaaggatggatcctgctgccaccaccctaagcactggggctggcactgcccttcagagtgttgttaccaatagtctgggaacaacttgaccctccagcatggcaggtttctgacctccagggatcataggacaaagctggatgcctgataccaggccccgtgtattagagcacacagtctagtagtcctgagctgagccttggacccctaaaatgctccagaaattaagacagttgactggagccacattataccacaaactcttaagggcaccaaaaaggataaaagaaaaagaagtccatccaaagttcagcaacttcaaagattgaagaaatatcagccaacaaagatgagaaagaaccagggcaagaactctggtaaccgaaaaagccagagtgtcttcttacttcaaaacaaccacactagttccccagcagtagttcctaaccagactgagatggctgaaataacataaataaaatccaaaatatggataggaatcaagatcattgacatacaggagaaagtcaaaaactaatccaaggaatctattgattacaataaaataatacaggagctgatagacaaaatggcctttataagaaagaaccagactgacttaatagagctgaaaaatgctctacaagaatttcataatgcaatcacaagaattaaccgcactgtgggaggccaaggtgagcagatcggttgaggccaggaggttgagaccagcctgaccaacatggcaaaaccctgtctctactaaaaaaataataataatacaaaaaattagccagttgtggtggtatgtgcctgtagtcccagctgtttgggaggctgaggcatgagaattgcttgaacccaggaggcagaggttgcagtaaaccgagattgcaccactgaactccagcctgggtgacagagtgagattccgtctcaaaaataaaaatcaaaaaaagagagaatgctgaatatgggatccagtctcttttgtcttgtaggatttctactgacaggtctgctgttagcctgacagggttccctttataggtgacctgtcccttctatctagctgcctttaatattttctgtttcatttcgacctggaaggatctgatgactatgtgtctcagggatggtcttctttgtagtattttgcaggggttctctgcatttcctgaattttaatgttggcctccctagcgaggtcggagaaattttcatgagtgatatcctgaaatatgttttccaagttgcttggtttctctccctgtctctcaggcatgccaaagagtcataggccactttatataatcccatatttcttgaaggttttcttctgtgttgttttttcttttcttttcttttttttattttgagactgagtcttgctcttgtcgcccaggctggagtgcaatggcgcaacctcggctcactgcaacctctgcctccctggttcaagcaattctccggcctcagcctcccgagtagctaggattacaggcgcctgccaccacgcccagctaatttttgtatttttagtagagatggggtttcgccatgttggccaggctggtctcaaactcctgacctcttgatctgtccgccttggcctcccaaagtgctggaattacagatgtgagcgaccgcaccaggcctgttttttattttccctgagttgtttcagagagccggccttcatgctctgagattttttcctcaacttggtcaattcttgttttttttttttttctttttttttttttttgagatggtgtctcactctatcgcccaggctggagtgcagcggtgtgatctcagctcactgcaagctccacctcccgggttcatgccattctcctgcctcagcctcccgagtagctgggactacaggcgcctgccaccacgcttggctaatttttttgtatttttagtagagacagggtttcaccatgttaggcaggatggtcttgaactcctgaccttgtgatccacctgccttggtctcccaaagtgctgggattacaggcatgaaccaatgcgcccggctcaacttggtcaattctgttaattcttttttttttttcttttttttgagacaaagtcccactcgtgaggtctggatcaagaccgcttttcgggtgacagtgtcaattgtctacagacttagggaaaattttaatggccacaccagtacagatacaggtggctccaaataaaccacttcccaatattaaacagtattcattgaagcaggaagctataagctgggtacggtgttgcacacctgtagttttagcctctgtaagcagacagggaggatctccatggattataggaatataatcaacttgagcaattaccctgttttacagcctcctccccttctgcctgtacctctccaaaccatggtttgaatgcagtcaccttgttgggctaaaacagctcctgacagaccccaagcagtgtagatgaacccaagttaactttccttattaacatgctgaagtctccactctggaaggagctatagcttcattaccataacatgctttctatgtgctggtatgactcactgcatctgtgcaactgggaccccaattctacatgcactgatgcaccttctcccatcaccattataccataaaactctcctgttacttgtcctcagggagacactgctttggagaatactcccagtgtcctctttacttgagccaagtaataaaagtattgatcaatacctgtgttctctggccgggcgaggtggctcgtgcctgtaatcccagcactttgggaggctgaggcggatggatcacctgaggtgaggagttcaagagcagcctggccaacatagtgaaaccttgcctctactaaaaatacaaaaattaactgggcatgatggtgggtgcctgtaatcccagctactccaaaagctgaggcaggagattcacttcaactggggaggcggaggttgcagcgagccaagatcccgccattgcactccagcctgggtgacaagagtgaaactccgtctcaaaacaaacaaacaaacaaacaaaaacctgtgttctcatggaaagtcatttgttatgcaccaggtgaatgaacctggtatttttcaggtaacactactcaggatgctgaggcaggaggatcccttgagcccaggaatttgaagccaccctgggcaacatagggagacatcatctcaaaacaagaagctataataggaataaaacaaataaccaaagattaccttgaaaagggattgattatcccttccaccagtcctaatagtcccatcttcctgacacaaaacctcacaggaaaggatgaagatttatacaagatttgagaactattaatactactgtgattcggccgggcgcagtggctcacacctgtaatcccaacactttgggaggccgaggcgagcagatcacgaggtcaggagatcgagaccatcctggctaacacggtgaaaccccgtctctactaaaaatagaaaaaaaattagccaggtgtggtggcgggtacctgtagtcccagctactcgggaggctgaggcaggagaatggtgtgaacctgggaggcggagcttgcagtgagctgagatcactccactgcactccagcctgggcaacagagtgagactctgtctcaaaaaaaaaaaaaatactactgtgattcctcatcaaccagtagttctaaacccccacactcttttatccaatgtacatgtaaactgtgaatatgtcactggtgttgatttatgcagtgctttttaggcataccaatacaccctgacagtatttgtttgcctttacctagattggatatcaatatatctggactgttgtgcctcaaggttacaccaaaagcccaacttatttttcacacatattaaaggctgacctagctgagctaaatttctcttgttatgcttctccaatctgcataattataaaaaggactccttgcacttcctggaacaaaaagcaaaaagaggtcataagctgtctacagaaaaactccagttttgctttatgagctatctacagaaaaactccagttttgccttacagaactaaaatatttggaacaattaattcctagggagaaactacagatacatctggattgagtaaccggacttcttggataccctactccaaaaagtaaaagacagctttggccaggcacggtggcccacgcctgtaatcctagcactttgggaggctgaggtggatggatcacctgaggtcaggagttcgagaccagcctgaccaacatgaagaaactccgtctctactaaaaatacaaaattagccaggtgtggtggtgcatgcctgtaatcccacctactcgggaggccgaggcaggagaattgtttgaacctaggaggcagaggtttcagtgagccgaggtcgcagcattacactccaccctgggcaacaagagcgaaactccatctaataaacaaacaaacaaaaaaaagacaacaggattttaggcttggctgactactgtcatagctggatgtccaatttttctctaatgccacagactttatatgcattgtagaaagatcagcctaacctcatacactggacatcagaaggacaaataataaataaagaaaaatcttacaagcccccgctttggcccatgcaaattattagctgctgtttttcctttctttgttttttgcgattttttgttcatgtaaggcatggcagttccctgggtgttctaattgaaaaacctggaggacaatgtagggctattggttattatagtcagcaattagaccatgtagtacatgggtgacctctttgtctgagggccatttttgccactgccatgctccttacgattactcagaaaattgtaatggaggctcctcattctatagaagctcttttgaattcacataatacacagcaattttccattaatagattggtttcttatgacaaacttacactgtctgcttcatatgctgccctctctatctgtaatactcttaatcctgcagtgcaacttcctgaaacaacagatgaaatatttcatcactgtattctactcacagaattggtgtccagacaggatttataggacacatcatgtaaaaatgttgatattatctggttcacagatggatcggatctaaaggatacattttgaaaatactgagcaggctacaaccttgtgtctcttgtggacatcagaaagagcaatcccaccgggtgcggtggctcatgcctgtaatcccagcactttgggaggctgaggcgggcggatcacaagttcaggagttcaagaccagcctggccaatatggtgaaaccccgtctctactaaaaatacaaacattagccgggtgtggtggcaggcgcctgtagtcccagttacttgggaggctgaggcaggagaatcgcttgaacctgggaggcagaggttgcagtgagcctagactgcgccactgcactccagcctgggcaacagagggagactctgtctcaaaaaaaaaagcaaaaaaaaaaaaaagccatcacttgcctcaagtaaaatcagcacagctagctgaattaacagcactcaccagtttgtcaactggccaaaaatcaaatggataatatttatacttaaaggtattatgctattggtgtagctcatgaccttgggatgttatggaatcaggctttttttttttgatacagaggcttgctctgttgcccaggctggagtgtagtggtgcaatcttggctcactgcaacctcctcctcccgggttcaagcaattctcctgcctcagcctcccgagtagctgggattacaggcgctcgccaccacccccggctaatttatttatttatttattttttagatggagtctcgctctggctggagtgcagtggcgcaaactcggctcactgcaagctccgcctcccgggttcacgccattctcctgcctcagcctcccgagtagctgggactacaggcacccgccacggcgcccagctaattttttgtatttttagtacagacggggtttcaccgtggtctctatctcccgacctcatgatctgcccacctcggcctcccaaagtgctgggattaaaggcatgagccaccatgcctggccaatttttgtatttttagtagagacaggttttcaccatgttggtcaggctggtctcgaactcctgacctcatgatccgcccccccaccccccacccccccactgtcccccaaagtgctaggattacaggcatgagccactgtgcctggccagtgaggttacttaacctcccccagatatctaattaaacatggctctcaagtttctgatcatttagaagccatccgattatcaaaaaagaatgttttattaacgttcctgaacattcaaactcacctctccaaagagtaaaaaaaaattatttcgcagatgcagcagcaaaaagactctcttgacaccaatatcacatgaaactataaaagtcactacattcaaaataagtgccattgaacaggaactccaagggattcaaaaagaggcttcagataagaaaaagtagatatggctaacaaagcggtaatgcttttcccccatttacaaattttggtgtggacccaacaggagacccatcttgcctttgagatttcaatttcttatggtacaacatgtttatgagccaactcacgggaaatctgagaaaatgattgtttggggaaagaaatactactggaaaccctcacctccattactgaataaagtttacactaaatatccaatttaatttatacaaagcataatccaagaaagcttttttttttttttttttttgaaacggagcctcactctgtcctctgtcaccccggctggagtgcagtggcgcgatcttggctcactgcagcctccgcctcctgggttcaagtgattctcctgcctcagcctcctgagtagctgggattacaggcatgcgccaccacacccagctaatttttctattttcagtagagacggggtttcactatgttggtgaggctggtctcgaattcctgacctcgtgatccgcccacctctgcctcccaaagtcctgggattacaggcatgagccaccgcacccggccaacttttttgtttgtttgtttgtttgtttgtttgagacggagtctcgctctgtcccccagcctggagtgcagtggcgtgatctcggctcactgcaacctccgcctcccgggttcaagccattctcctgcctcaggctccggagtagctgggactacaggcgcctgccaccacgcccagctaatttttttgtatttttagtagagacggggtttcatcatattagccaggatggtctcgatctcctgacctcgtgatccgcccgcctcggcctcccaaagtgctgggattacaggtgtgagccaccgcgcccagccaactttttttttaagtatagaaaattttacaggttgggcgcggtggcaggcgcctataatcccagctgctcggggggctgagacaggaaaatcacttgaacttggccaagaggcggaggttgcagtgagccgagatcgcagcaatgcactccagcctgggtgacagagcgagactccatctcaaaaaaaaaaaaaaaaaaagaggtggagatttcccagaactgaggttccctcccctttttagactatatagggtaacttccaaacattgccagggcattggtatactgtcatggcgctggcgggagttagtatgctaatgcattataattagcgtataatgagcagtgaggatgaccacaggtcactttcatcaccatcttggttttggtgcgttttagccagcttctttactgcatcctgttttatcagcagggtctttgtgacctgcatcttgtgccaacctcctatctcatcctgtgactaagaatgcctaacctgggaatgcagccgagtatttctcagccttactttatccagcccattttcaagatggagtcactctgattccaatgccactgacaatgataagcacttgccagcaaagaggtgaacgcatggatttaaggcacttgaaatatctcagtgtaaaagcaccctgtgcatgtagcaggacgagccgcagacaaaacctctcagacaccgagttgcagaaggaagggctttattcagctgggagcattggccagctactgtctcaaaatctgagctcccggagtgcacaatttctgtcccttttaagggctcacaacactaaagatttcacatgaaagggtcgtgattgatttgagcaagcaaggggtatgtgacaggggctgcatgcaccggtggtcagggaggaacagaacagggcagggagtttcacaatgttcttctatacaatctaaggaatctatgaataacatcggcttctaaatcataagttgatttttaactactgggtttaggccaggcgggcctaggcctggtttcgggcctggcgcggggttgcctgtctttggttttacttccttgttgtttttactgaatataaaacaatgtgagagggtctctctcttctctcatgcatacatactccatgtttgaacaccgcagccattgtcctgtaacataatagcatttgtctcattagctttttgatgttgatatcagatttctagaggaatctgtaggttaaagatataaataaaagtgttgctaatgggctgagaacggtggttcacgcctgtaatcctagcacttcggtagaccattgcaggcagatcacttgaggccagaagttcgagaccagcctggccaaaatgaggaaaccccgtctctactaaaaatacaaaaattagcagggtatggtggcacacgcctgtaatcccagctactcggatggttgaggcacgagaatcgcttgaacccgggaggcataggctgcagtgagccaagatcacaccactgcaccccagcctgagtgacagagagaactatgtcttaaaaaaaagacaaaaaaaaaaaaaaaaggaagaagccgagcatcacaaattctgaaataagaagtctccaaacacgcgggcaatcagttgcacacagtacccccagaaatgtgcgtatggcctcttctaagatgggagaccctcctccgcatctggacctggagtcgccatttcctagcgcccctcgcagtggagcttgcccctttcttcggaaagtcggaagaaagccaccttaagcgctgcccatgtctgggaactacattacccagaatccgccctgcgaaatggtaacgtggctgagccaatgaagcttcagagaagccgtgccattgccggggcacgtaaagtcaagccaggacttccggcgtcctagccgtggcagccattttggcctgtcaggtccatccggcgatgctgggtctggacgagctcgggaggagtggttgtggccattgcacacaggcggatctgaggttcggcgacgccgctggtcgcgacccgggacaggacaacgacaggaacaccgccgagcccgcgttccccccccgcccagagtcatggcggcagcagccgctctgagggcgcctgctcaggtgagcgctgcgacctccgggccttacccaccctacccacccagaccctgaggcccctgatcgtgagggccgcctcctcgcgtccctgcagcccaggcctctgtcagggacggagaggcgccggcgggtgggatccctgtttccgacacccagttgatgcggtcggcagagcgagactggcggagggcaaaggcctgcaggcgcgactgaggcaggaggatgcggaacacggggacatcgtgtgtctactgggaaagaagtgtgatacggagttatttctttttttttttttttttgagacggagtctcactctgtcgcccaggctggagtgcagtggcgcgatctcggctcactgcaagctccacctccccggttcaagcgattctcctgcctcagcctcccgagtagctgggattacaggcatgcgccaccacggggtttcaccatgttggctaggctggcctcgaactcctgaccttaggtgatccgcccacctcggcctcccaaagtgctgggaatacaggcgtgagccaccgcgcctggccgaggcggagttgtttcttcagtaccaggctgagggttgaactttgactgtgaggacgctaaaagccatggacagttttgaacaaaggaggaaatctgtgttagagttgcgattcccaaaagatgttcgaaggaagaacagagttgaaggcagtgatgaggacattgagaggttgaatcattgagaggtgacattgagcactgggccacaagattagagactcagtctgaagtcatctggctgcagggccaaaaaaagcttacagagaagcctgagtctatcaaatccgagcacagacacatttgtgaaagccctgccttttggcacacctcatggctacagaagcacttacagaatccacagtaggaagtaggggatgctctagtccttcactggtcctcatcctatcccacatgtctagatcttggcatcttttttttttttcggcgacgggttctcactcaacacccaggctgggttgcggtgacgcgatcacggcgcagcacggcctcgacctctccgggctcaggagagcctctcatctcagtctcccgagtaactggctttttgtatttttagtagaggtggggtttcacggccgggcgcggtggctcacgcctgtaatcctagcactttgggaggccgaggcgggcggatcacgaggtcaggagtttgagaccatcctggctaacacggtgaaatcccccctctactaaaaatacaaaaaattagccaggcctggtggcacacacctgtagtcccaactacttgggaggctgaggcaggagaatcgcttgaacccgggaggcagaggttgcagtgagccgagatcgcgccactgcactccagcctgggcgacagagaaagactccgtctgaaaaaaaaaaaaaaaagagagagagagagatggggtttcgccatgttgcccaggctagtctcgaacccttgggctcaagcagtcctcttgcttcggcttcccaaagtgctgggatgccaagcaggaactaccgcacctcctaggacacttaagtgccatttctccggtccttcaatctggggatcttggaaaaacctcaaaccccaaacctacatcagtgacataggttatggggagttgttgctatgtctgtcaactaatgtaacacatgtggagggttcacccaggaactgatactggggtgtgcaaatacttacttagaagtgaaactagaggggtgaggtgatgttaccaatttcttaataggcgctgtctggttactgagtgggcaacagactgtggggttgagggaggaggaagatcaaactggaagctactgccctagtcgaggtgaggattaatggactagagttgtggcttaggcaatgtggctagatctggatttgtgttttttagaggggcaagtcaattttttttttcccaagatggagtctggacctgttgcccaggctggagtgcaatagtggaatcttggctcactgcaacctccgcctcctgagttcaagcgattctcctgcctcagcctccgaagtagctgggattacaggcgcgcgcctccacacccagctaatttttgtatttttagtagagactaggtttcgccatattatccaggctgcctcgaactcctgacctcgtgatccacccgccttggcctcccaaagtgctgggattacaggcttgagccaccgtgcccagcctggcaactcaatttttaaatgtgaacagtgagagcttgagaggattcaggaaacacccctgggttttttatcttagcagctgtagcaatgggagctgcatcaactgagatgagcaagttgatagcaggtgtaatattcactgaggctatcaggaggtttgttttggccattctgcgtggaaaaaaatacaaattgcttttgctctgctctcccccacaacaatcaacacagagtacttctgtgactagataatgtgtggatggttttcctcatacaccaagtagttctgcagtggacatcagatcccacagggtgaagtctcagtcccacgggactgtccgccaacccctttcgatgccaatcacaagccccaggatgtttttttttttttacctgtcctttgactgacttgataaaaatcaggttcccatgaccccttcctcggcttccattaaattgctagagccagtcacagaacctcaggagatgctttaatttgccagtttattttaaagagtatttattacaaaggttacagatgaagagatgcataaggggaagcgacccagagcttttatgatcttcaggcacaccaccatccaggaacttccatgtgtttggctatttggaagctccccagaccctgtctttatggggttttatggaggctttattacataggcatgattaattaaatcattggtcaatgctgatcagcttaacttttggccccctctcccctttctggagattggggtatggggctgaaatttccagacctcgaatcctgacatagtctcttttccctgaccggtctccattctgaagttatctaggggtttccaaccatcagtcaactcattgccattcaaagtcacttataaatttgagaatttcatgaattttaggagttgcatgccagaaaaggagatgaccaaatatatatttcacaatatcacacccatattaagattctgaaatgtattagatactacttagtggagctattaaatgggcagctggacacatagatgcaaatatctggggaagcgttgatattggaggtatctaatatatggtaactactgtgtggactgaaatgattgagtcatggctcacatttggaaggcacaaccttcagattatgttgatgacactgttggacaggaagtagagtttgggtttcctgcttgtgtacctggtgatggtattggatttgagaaacacaggtaagggaggtaaatggccatgaagggaggatacatctgtttcttcttcttctttttttttttttttttttgagacagagttttgctttgtcgcccagactagagtgccgtggtgcaatctcggctcactgcaacctccgcctcctgggttcaagtgattcttctgcctcagcctcccgagtagctgggattataggtgcctgccaccatgcctggctaatttttgtatttttagtacagacagggtttcaccatcttggctaggctggaaagggaggatacatctgacagactagtttggcaagtgacataatgcttccaagaaatgaatagacttgagatgcatgctgacgcataggagtagctgagggaagatgacactcaggctggagcttgtgtttattggccactttgtggcctcaccaagattttgagatgactttagtgtggcctggggtgtttgattcagcctggtggatgtggaggcaaatatggtcaccttgtgagagtcactatgcatgagattgatgaccagtggttctgggctttgaatggggttaggtggacagaagaaagtcatagttgccgggcatagtggctcacacctgtgatcccagcactgtgggaggccaaggtgggcagatcacgtgaggccgggggttcgagatcagcgtcgccaacatgatgaaagcccatctctactaaaaatacaaaaaaagtagctgacgtggtggcaggcacctgtaatcccagatattcgggggctgagacaggagaatcgcttgaacctgggaggcagaggttgcagtgaaccgagattgtgtcattgcactctagcctgggtgacaagagtgaaactccgtctcaaaaaaaaaaaaaaaaaaaaagtcagccgggcgcggtggctcacacctgtaatcccagcactttcggaggctgaggtgggcggatcacttgaggtcgggagttggagaccagcctgaccaacatggagaaaccccgtctctactaaaaaatataaaattagccaggcgtggtggctaatgcctctaatcccagctactcgggaggctgaggcaggagaatcacttgaacctgggaggtggaggttgcggtgagctgagatcgcgccattgcactccagcctgggcaacaagagtgaaactccatctcaaaaatataaataaataaataaataaataaataaataaataaataaataaaaagtcatagtttctgaggatagcaaatgcagcacagaagtggaatagaaccataaatatctgaaaatgctagtggttctttttgtctgtggatttatgcatggagggcgtcagaatgatttggggctaccattgctattgagaaacattggaattctgtggtaattttggattcctttttaatttaccaagactactgtggatgatgtcagccacattatggtgtaagccctaaagttaaggtcagtatcatgtgctaccttcatgtctggtgataccagtactacctcacatggtctgagtgcaaatctccctccccactctgctctttgggataatgtgtcctagcttaactacccttttaatcaagaggactagacagagttcctggttattatttatttgtagcaggtttcagtttctttttttcttttttttttttttgagacggagtctcgctctgtcgcccaggctggagtacagtggcagatctcatctcactgcaagctccgcctcctgggttcatgattctcccgcctcagcctcctgagtacctgggactacaggcacccgccaccacacccggctaatttttgtatttttagtagagacggggtttcacaatgttagccaggatggtctcgatctcctgacctcgtgatctgcccacctcggcctcccaaagtgcagggattataggcgtgggcgtgagccaccgcacccaatgcaggtttcaatttcatttctacccacagagttactcaagccagttgcagctgggtgtggtatcgcacacctgtggtcccagctactcaggaggctgagatgggaggattgctggaacccaggaagttcaggctgcagtgagctgtgattgtgccactatgctccagcaggagtgacagaacaagaccctgtctcaaaaattaaaaataaaaacaagccagttgcattcttttatgggaatcagggactatcacaccctcttgattgagcaaagcttacataccacaatccctggttgctcttttttttttttttttttttgagacagggtcttgctccgttgcccaggctagagtgcagtggtgccatctaggctcactgcaacctccatctcctgggttcaaatgattctcctgtctcaggctcctgagtagctgggactacaggtgcatgccaccatacccagccaatttttgtattttagtagagacggggtttcaccttgttggtcaggctggtctcgaactcctgacctcaggtgatccacccgcctcggcgtcccaaattactgggattacaggcgtgcgccaccgcgcccggccactctctcttatgcatagtgcaacccccatgtggctctctgtggtgagtggtgtcctcttctctcaagcgctgagcatatttgattaatgaactttcgtgatgacttgtgttcagcgtcaggtgttgtgtttggccatcatcataaccctagggtgaaactcctactctttaccagtagaagaaagggggattaaaatactgtaacttctggcaagaccagagagaggcctatagtgtgggcagttaggtggtggtggcaattggcatgtgtctgtggtgtccaaagatgggaaggatgtgtacgtacataaggattatgtttgaaaggcctcaggcactgcactgggattcatgtgacctttgctgtaccaggggaattgctagaaaggagaggatggaaccctttatttcaggaccacagcatagatacctgtgtgcttatctgcctcttgttgctgacggctatgtgtcatgattaatggtcccatgaggacacagtggcactagtgggcaaaatttctcctctgagttggggatcctgggaggaggaggatgggcaagggtagatatgttggggaagtggactgtgggtcttcagcataggggccatttgtggtttcatctatccccatcataacagagcagtgtgacctttgaagatgtggctgtaaacttttccctggaggaatggagtcttcttaatgaggctcagagatgcctgtaccgtgacgtgatgctggagaccttgacacttatatcctccctgggtaaggtactcatattcacctgtgacctgagttagtctgtgcccctcacctttatgccttatctctttctcacaccaggaccatggacacagcttcattctccagttctctggagaggttctgttgttggtcggactgaggtgtacgtactgccctgtcctttccttgagcagccccaacctgctttgttgcaggcttccagggaaggagtcagggtcaggagtcttaaagtcaccctaatgcctcccaccttggttgtcctctgcctgtctgggtgactgtgcagatccaaggcttctgtttgtctcaagttccgtttccctcctttagttcacatttgttcatgctacgaattgtcgtcactgatgtggtcattatgtacatgaaccacagcctattcttgcaataccctacttcaaaattctttttgtagtatttcatcaggcacaataacacctgtcatcccagctcttcagaggctactcggagcccaggagtttgaggccagcctggccaacatagcaggtcctcatctctaaaaatatataggaaggaattctttttgtaatatttagtttcttttcctgtggaatatcaaatgcagagttgttctgagccagcattggctgttcgtctgtcctatttttcccttagtacttacattatcgagtttccatgtagttgctcatcttggtggtgaaatgaagagcccgtggttgtccctaagatgtaaatgagtccagccttagcaaggacttggggcagcttggttctgaagaatagcatgtgagtaaggtcatgacatcagggctctattcaaattatgccatagacctcttctatttgactagtattttcatgccaatagaagtagccccactttatgtctttccttccccattcttgagagtgccagtttattagtcctacaccttgttgcttctgctgttacatccagcccaggactaattttcatatatctggactccacgtctcacctatttttctcacggctctgtctgcagtggtcttcaatattggctcatgtattttgtattacgaagtatatacccattcttttttttttttttttttttttttttgagatggagtttcgctcttgtttcccaggttggagtgcaatagtgcgatctcggctcactgcaacctccgcctcccaggttcaagtgattctctggcctcagcctcctgagtagctaggattacaggggcccaccaccacgcccggctaatttttggggtatttttagtaaagatagggttttaccatgctggcaaggctggtcttgaactgacctcaggtgatccacgcccctcaacttcccaaagtgctgggattacaggtgtgagccaccgcgcccagcctctatggagtatataatcttttttttttttttttcttgagacagtttgctctgttgcccacgctggagtgcagtggcacagtctaggctcactgcaacctccgcctcccaggttcaagcaagtctcctgcctcagcctcccgagtatctggtattacaggtgcatgccaccacacctggctaacttttatttttagtagagatggggttttgccatgttggttgttgaccaggctggtctcaaacccctgaccttgtgatccacccacctcggcctcgcaaagtgctgggattagaggcatgagccacggttctcggccacgtatatacctattcttaacagtccctgaccaaaggatgttgtgctctagtcatgttggggggggcctggacatatttatatagtactcacacgtcatcagcaaataaggttccacaggcaagttgtttgcaaatgaaggagttatagaccctgcctttattctgtctgttgactcatttagtcatgcccttgacaatatgaggccttctatatctgtgataatgctaagcagccccaacctcaacctgaacccaactccctgtttgtgcaaataattccatagactagttttttggtttgtcagatactcttgtgggtaggctgcatactcaacaaagtcaacatgtacctcaccagcatttctttgcttttaggttgttggcatggaggggaagatgaggcagcaccttctaagcagagcacgtgtatacatatatacaaagaccagggaggtcatagtggagaaaggccttatgagtgtggggaatataggaaattatttaagaacaagtcctgcctcactgaacccagaagagatcacaaacacaggaatgttcgcactggagaaaggccttatgagtgcagcaaatatgggaaattatttcaccaaaagcctacactccatattcatgagagatttcatactgggcaaaagacctatgagtgcagtgagtgtggaaaatcatttcaccaaagctcttcactcttgcagcgtcagacacttcacactagagaaaggccttatgagtgtattgaatgtgggaaagcctttgctgaaaagtccagtctcattaaccacaggaaagttcactctggagcaaagcgttatgaatgcaatgaatgtgggaagtcctttgcttatacatctagtctcattaaacacaggaggattcacactggagagaggccttatgagtgcagtgaatgtgggagatcctttgctgaaaactccagtcttattaaacacttgagagttcacacaggagaaaggccttatgaatgcgttgagtgtggaaaatcatttcgccgaagctcttcactcttgcagcatcagagagttcacactagagaaaggccttatgaatgtagtgaatgtgggaaatcctttagcttaaggtccaacctcattcaccatcagcgagttcatactggagaaaggcatgagtgcgggcagtgtgggaaatcctttagccgaaaatctagccttattatacatctgagagttcacactggagaaaggccttatgagtgcagtgactgtgggaaatcctttgctgaaaactccagccttattaaacacttgagagttcacactggagaaaggccatatgaatgcattgattgtggaaaatcatttcgccacagttcttcgttccgtcgccatcagagagttcatactggaatgaggccttataagtgaagcaaattttggaaattctcttgcccaggctttttgctccttcaaggccagagagttcacaccagatcaaggtgttatgagtgtgacaaatggggaatattctttagctagaatgctagcttctttacataaaagagtgctcccactgaagaagtgccttttgagtgcaatgaatgtgagaaagccttcagccctctctcattggttaccacaatatttacatgaggaaaataccacagatgtggaggtaatattattttttcttcaatataacactggaggaaaccccttatgaggatgccatctgcctaaattgaatgtcatacatcaaatagctgcatacattccaggtatgtgggaactgcatagtatttttcgacctgcccaggtctcttgctagacttctgtgacttacagttctcttctaaaaagcatttcacctttaccacttggcaggtgcccacagtacatcattcgcctaactcatcatgatccagaagtaactttgattttgtttcattcaacagagggattttttagtatcctcagcactcattctattctcatttctttctctccaatgagttaggccatgaacctgactcatttttggcacagaggactcttctgataacttgaaaaaatggactacctttttcagggatcttttggatctcacagagttcttaagatggaattttccagcctgccagtcatgaatctcagacagcctgccacctattgccctgatttgtgttataataaaggccttgttgcttaagacaccttcagtctttgcaggagggcatggaagctccaagtgcttttctcatactttaccctatgcatctctttatctgcatcttttgtactatttataattaaccagtaagttattttccctgagttttatgtgccattctatcaaattagtcaaatccagttgtggggtccacgggatttgtggtttatagctcatcagtcaaaagcagaggctctggggctttgattgtcatcagaaatgggagcctcagtcttggtgactgagtcctcaaactgggggatgtgatgctatctgcaggtagataatgactgagttgaactggaggacccccagcttgtgtccacgggaggattgcttggtgtgtgtggaaaacaccctgcacatctggtcacagaattattccatattgattgttgttgtgttgtgtgacagacaatagaggaaaagtttatttttttctacacatacgctatggcttcccttctattattccatatctttcaactcctgccatactatttctttctctccaagtttttgttcttcctcagagttcccataaatggaaaggatacgcacttcattgaaataagaatttcatgttagccaagttttcaggatagccatgagtttcacttaattatctgagaacttagagcttactgtcctctacttactatccactgagacttaatgtgttcttggccatcacagaaactttactagctacttatgccattgtcaatggataactctctgaatccacattaataactttgtaattagcttagtcctcagctgtttttcagagataatccccagtcttcatgcagacactatcactgcacctacaggtgaaatgataatcacttcctagcaaggaggttggatcatggaatacaagataatttctcaggaatcagatggtcttattccacacctgcaggaatgtcagcattgcaaccaccatggcaaatattgatttaataaacaattactattcccagataagtgtcaaaatcttagaagaaattgtcatatcttagacaatttagaagtgatggagggtggatgatgagaaattatcgcaccactgcactccagcctgggcgacagagcaagactctgtctcaaaaaaaaaaaaaaaaaaaaagctttactcacataaagtgaagaacaagaagacttttttgagtagatgtttagtgtccttataacattttttgtatatgcatttttatccttttgggaacatgatttacaaatgcgagctgcagggctattgcattaacgtgttgaatgcaagagttaaaacttcctgtcccatttagtgaatggaaaaatacttaagttacatgaataaaaattgtaaattacaaatagcaagatagttaaggatgtaaaacatgtcaatccctaaatgttacttaatgacatcatgttttataggtacattttattttcagttactagtattttattcccttgctggaaagatgtccagtgattctgaatcaatacaggtgtgtgggatgtcatctagaagtcataaaatggcttattcagattaaccatgttatgaccactcacactcgctgatacatatcttcctgtcacttccgtggagagtgaaattttctcttttattttttattctttgagacagagtttcactcttgttgcccaggctggggtgcaatggcgtgatctcagctcactgcaacctccacctcccaggttcaagtcattctcctgtctcagcctctagagtagctgggattacaggtgcccaccaccatgcccggataatttttgtatctttagtagagacggggttttgctatgttggccaggctggtctcaaactcctgacgtcagatgatccgcctgcctcagcctcctaaagtgctgggagtacaagcgtgcgccaccacgcccaaccaaaattttcttgataacaccctaattatattcccacaaaacctttgtagtcagagaaaatctgtagtttataaagacaaagtttttagtaatgagagcacttttaggatctgtaggctcttgtctgtataattaatacaacatttcttttttttttttttttttttttttttgagacaaagttttgctcttgttgcccaggctggagcgcagtggcacgatcttggctccctgcaacctccgcctcctgggttcaagcgattctcctgcctcggcctcccgagtagctgggattacagttgtccaccaccacacccagctaattttttgtatatttagtagagacgaggtttcaccatgttgaccaggctggtcttgaacttctgacctcaggtgatccacccgccccagcctcccaaagtgctgggattactggcgtgagccaccgtgcccggcctgttctgcttatatatgactaaaatttatgtgaaaatttctgtataaggccaggcttggtggctcacgcctgtaatcccagcactttgggaggccaaggtgggtggatcacctgaggtcaggagttcgagaacagcctgacccacatggagaaaccccatctgtactaaaaatacaaaattagctgggcttggtggcgcatgcctataatcccagctacttgggaaggctgaggcaggagaatcgcttgaacctgggaggtggagtttgcggtgagccgagatcacgctgttgcactccagcctgggcaacaagagcaaaattccgtctcaaaaaaagaaaaagaaaatttctgtacaaaatatttagatttccttcctattctcaatatattagtgtgctttatcattctaactttttggtattttgattatgctagtaatttcttagttttgttcaattttaatgtgatatataaatcaatatattccctgataaatttttacataatttatgtaaatttgttgttgttggccgggcatggtggttcacacctgtaatcccagcactttgggaggctgaggcagacagatcatctgaagtcaggagtttgagaccagcctggccaacatggcgaaccgtctctactaaaaataaaaaattagccgggtgtggtggcatgcacctgcagtcccagctactcgggaggctgaggcaggagaattgcttgaacctgggaggtggaggttgcagtgagccaagatggctccactgcactccagcctgggtgatagagtgaaactccgtctcaaaaaaataaataaataaataaatttgttgtagtatattttctccttgaattacttactctaaaacaagtaactttactaacctctacttggtctacctggttaattaattctttcttttttttttttcttttttttttttttgagacggagtctcactgtggcccaggctgaagtgcagtggcacaatctcagctcactgcaacctctgcctcccaggttcaggtgattctcctacttcagcctcccgagtagctgggattacaggtgcctgccaccacgcctggctaatttttctatttttcgtagagatgaggtttcaccattgttggccaggctggtcttgaactcctgacctcaggtgatccagccgcctcggcctcccaaagtactgggattacaggcgtgagctaccatgcccagcctaattaattatttttcaaatatctttaaactgatccaattcatgatcctaaaatgcacagtggcaaatgctgttagagtacattattctacatactgaatcttctgtttccatagttaagtttctggtttattaggagacatttttttttctttccagaattttaatgcaagttttactttttcaaattaataaaatgttagcaacagagaataacttgggaaaacaagtagcatttttatttcaatcattcttcatttgaatgcactaggaagctggagaattttagactcttaagaaatttactttaaagccaggcaccatggctctgtagtcccagcttctcagaaggctgaaacaggaggattacatgagctcgagtttgagtaaggcctgggcgacatagtctctttaaaaaaattcagttcatgcgggtgcggtggctcacgcctgtaatcccagcactttgggaggctgaggcaggcgggttgcctgagctcaggagttcgagaccaccctgggcaagacggtgaaaccctgtctctactaaaatacagaaaattagccggacgagccggcatgtgcctgtagacccagctactcaggaggctgaggcaggagacttgcttgaacccgggaggcggaggttgcagtgagccgagatgtgctactgcactccagcctgggcgacagagtgagactcatctcaaataaataagataataaaatccagttcagtaaaatgtgcctgataaaatataagtgactactggcctggagcagtggctcacgcctgtaatcctagcactttgagaggccaaggcaggtggatcacctgaggtccggagtttgagaccagccgagtcaacatggtgaaaccctgtctttactaaaaaatacaaaaattaactgggtgtggtggcacattcctgtaatcctggctacttgggaggctgaggcaggagaattgcttgaaccctccgggcggaggttgcagtgagctgagatcacaccactgcactccagcctgggcgacagggcaagacaccgtctcaacaaaacatatatataagtaatgaatgaatattatgtcaatattctaagtcagaatgttactgtaatactttttaattctcattccatttaaaataactggttaattttcaaatcataatgaaatttttacaaatttatgtgtagtacaaagcatgcatatacattcatatgtattatatgtatatatagcctttaaaaatatttatgagctttatgccgggcgcggtggctcacgcctgtaatcctagcactttgggaggcggaggcgggcggatcacgaggtcaggagatcaagatcatccgggctaacacagtgaaaccccgtctctactaaaaatacaaaaaaattagccgggcatggtgggcacctgtagtcccagctactcgggaggctgaggcaggagaatggcgtgaacccgggaggcgaagcttgcagtgagccgagatcgcgccactgcactccagcctgggctacagagccagactccgttctaaaaaaaaaaaaaaaaaaaaaaaaaaaaaaatatatatatatatatatatatatatatatatatatatacacacacacacacacacactagctttagcttccagtagatgcaatttatgtctttatgaccctatgtaatgaaatgtccattttgattcgtggctcttgatggcatctcaaatgatgtcttagatctgcgaagaagctcagcatcacaaattctgaaataagtctccaaacacacgggtaatcggttgcacacagtacccgcagaaatgcgcgtatggcctcttctaagatgggggagcctcctctgcaactggacctggagttgccatttcctaacgcccgtcgcggtggagcttagccccttcttccgaaagtcaggttggaggcggcctttaagcgccgcgcgtctctcggaacttaaatattacccggaatcgtctctgtgaattggaaagcccattgaagcctcagagaagccgcgccattgcggaggcacgtaacgtcaagcagggacttcctgcgtcctcgccgcggtggccattttggcttgtcgggaccatccacctatgctgcgtctgtacctctttgtcaggaccgagagcgcgcgagaggagtggttgtgcccattgcacacaggcggatctgaggcttggcgacgccgctggtcgcgacctgggacaggacgagcacaggaaccgcctggcctgcgtccccgcccgcgcatgaagtcgtggcggcggccgctcaagtgagccctgcgacctccaggcctcacccgccatccccacacagaccctgagacccctgactgtgaggggcgcttcctcgcgtccttgcagctcaggcctctgtcagggacctagaggcgccggcgggtggaatccctgtttccgacaccggttgatgcggtcgggagagcgagactggccgagggaccggcttaggcaaaggcctggaggcacgactgcgccaggaggattcggaacacagggacatcttgtgtccactgagaacaaagtatgagtcggagttatttcctcagtaccaggctgaggattgatctttgtgaggaccgtagaagccatggacagttttgaacaaaggaggaaatctgtgttagagttaaagattccgaaaagatgttcaaaggaagaacggagtgtaaggcggtgatgaggacagtgaggcattgagaggttgaatatttgctcaaggtcacgtagctggtaagaggtgacattgagcactgggccacaagattagagactcagcctgaggtcacctggctacagggccaaaaaaagcttacagagaaacctgagtctatcaaatcccagcagggacacattcctgaaagctccgccttttggcacaccttctcatggctatggaagtatttaaggaacccacagaaggaagtataggatgctctagtccctcactggtcctcatcctcacctatatgtctagatcttaatgtcctgggaatttatttatttagcgacagagtgtcactcttggtacccaggttggagtgcagtgacgcgatcatggctcagcatagtcttgacctccccaggctcaggtgatcctcccatctcagtctcccgagaaactggctaatgtttgtgtttttaatagagacggggttttgccatgttgcctaagatggtcgaaaactcctgggctcaagcaatcctcccgccttggcctcctaaagtgctgggattacaggcgtgagccgctggtctggccaggcctcctaggactcttaagtgcaatttctcctgtccttcgatctggggatcttgcaaaatcctcaaaccccaaacctaagtcactgacacaggctatggagaagtgttttcatgtctgtcgaccggtgggaaacacatgtggtggattaacccaggaatgatactgggatgtggaaatggcttagaagtgaaactggagaggccgggcgtggtggctctcgcctgtaatcccagcactttgggaggtcaaggcgggtggatcgcttgaggtcaggagatctagaccagtctggccaacatggtaaaacccagtctctactaaaaatacaaaaatcagctgggcatggtggcgggtgcctggaatctcagctactcgcaggctgaggtgtaagactcccttgaacctgggagatggaggctgcaatgagccaagattgtgccaatctgcactcgagcctgagcaacaaagtgagaatccatcgcgaaaaaaaaaagaaagtgaaactggagggggttaaatgatgttaccagtgttttaacaggttctgtctggttacagagtggacaacagactgtggggttgagggaggaggaagatcaaactggaagctactgccctagtccagatgctcaaatcctgacagtcttttccctgaccagtctccatcctgaagttatctaggggttaccaaccatcattcaactcattaccattcaaagtcacttataaatttgagagtttcatgaattttaggagttccatgccaggaaaggagatgaccaaatatatatttcacaataccacagccatgttaagattctgaaatgtaatagataatacttagtggagctatcaaatgggcacctaaacccatggatgcaaatatctggggaagggttaatattggagctatccaatatatggtagccactgtgtggagcaagatgagtgagtcatggatcacatttggaaggggcaaccttcagattatggtggtgacactactaggaagacaggaagtggaggttgggttgcctgcttgtgtacctggtgatggtattgtacttcagaaaacaggtgagggaggtaaatggccatgaagggagaatatatctggtagcctagtttggcaggtgacataggcttccaaggaatgaatagacatgagatgcaagcagaagcataggagtagctgagggaagatgacactcagcctggaccttgtgctaattcgccactctgtggccacaccacgatattgagatgacttttgtggggcctggggtgtttcattcagcctggtggatatggaggcaaataaggtcaccttgtgagagtcactaggcccgagattgacggccaatgggtctaggctttgaatggagttaggtggacagaagaaagtcataatttctgaagataacaaatgcagcacagaagtggaatagggccatgaatacctgaaaacactaacgttcttttttcctgtggatttatgcatggagggcttcgtataatgacttggtactaccactgctattaggaaccattggaattctgtgataattttggattgctttttaattcaccaagactactgtggatgatgtcagccacattatggtgtgagccctaaatttaaggtcaatatcatgtgctaccttcatatctggtgatactagtattacctcaaatggtctgagtacaaatcccccttcccactctgctcttttgtataatgtgtcctagcctaactacccttttaatcaagaggactaagcagagttcctgtttattatttatttgtagcaagtttgaatttcatttctacacacagagttaattcaaacaagccagttacagctgggtgtggtgtcgcacacctatggtcccagccactcgggaggctgaggtaggaggatccctgaaacctggaaagttcaggctgcagtgagctgtaattgcaccactacgctccagcaggagtgacagagcgagaccctgtctcaaaaattaaaaacaagccagttgcatcctttcaagggaatcaggggctatcacaccttcttgattcagaaaagcttacataccacagtccctggttgctctctcttatgcatagtgcaacccccatgtggctatctgtggtgagtggtgtcctcttctctcaagttgtgagcatatttgattaattaactttcttgatgacttatgttcagcatcaggtgttgtgtgtttggccatcactataaccctagggtaagactcctacccttatcagtagaagaaagggggaataaaatactttaacttctggcaaggccagagagaggtctatggtgtgggggagttaggtgttggtggcaattgacatgtgtctttggtgtccaaagatgggaaggatgtataggtacacagggattatgtttgaaggttcttaggcactgcattgggattcatgtgacctttgctataccaggggaattgctagaaaggaggggatggaaccccttatttcaggatcacagcatagatatctatttgtttatctgcctcttgttgctgatggctatgtgtcatgatcagtggtcccatgaggacacagtggcactagtgggcaaagtttctcctctgagttggggatcctgggagaaggaggatgggcaagggtagatatgttggggaagtggattgtgggtcttcagcacaggggccatttatggtttcatctatccccatcataacagagcagtgtgacctttgaagacgtggctgtaaacttttccctggaggaatggagtcttcttaatgaggctcagggatgcctgtaccatgatgtgatgctggagaccttgacacttatatcctccctgggtaaggtactcatacttaactgtgacctgagttagtctctgcccctcccctttattcctcttggtaataacgtctttctcacatcaggactgtggcacagcttcattctccaattctctggatcagttctgtggttggtagtactgagatacatgtactgccctctcctttccttgagcagccccagtctgctttgttgcaggctcccagggaaagagttagggtcaggagtcttaaagtcaccctaatgcatcccaccttggttgtcttctgcctttctgggtgactgtgcagatctaagacttctttttttgagacggagtctcgctctgtcgcccaggctggagtgcagtggcgcagtctcggctcactgcaagctctgcctcccgggttcatgccattctcctgcctcagcctcccgagtagctgggactacaggcgcccgccaccacgcccggctaattttttgtatttttagtagagacgggatttcaccgtgttcaccaggatggtctcgatctcctgacctcgtgatccgcccgcctcggcctcccaaagtgctgggattacaggcatgagccgccgcgccccgcccccattgcatttttcagcctgcctgtgtcccttgccagacttatgtgactgccagttatcttgcaaaaagcatttcacctttaccacttggcaggtactcacagtttcatcactcccctacctcattatgatccagacgtaactttttctttcattcaccagggggattttttagtatcctcagtactcattccattctcaattctttgtgtctgatgaggtaggccaaggacctgactaatttttggtgcagagaactcttctggtgatttgaaaagatggactacctttttcagggatctcttggatctcacaggattctttttttttttttttaagatggagtcccgctctgtcacccatactggagtgcagtggcgcaatctcggctcactgcaagctccacctcccgggttcacaccattctcctgcctcagcctcccaagtagctgggactacaggtgcccgccaccacgcccggctaattttttttttttttttttttttgtattttcagtagagatggggtttcactgtgttagccaggatggtctcgatctcctgacctcgtgatccacctgcctcagcctcccaaaatgctgggattataggcgtgagccaccgtgcccggccctcacagcattcttaagatagaattttccagcctgccagtcacaaatcagacagcctgcctgccgcctatttcccttgtttgtattataataaagactctgctgcttaagacaccttcaatcttgagagctgtatttacagtgtggaattgtttgaacactggatttgcagatgggcatggtggctcatgcctgtgataccagcactttgggaggccgaggcagaagggtcagttgaggtcaggagttccagaccagcctggccaacatgctgaaaccccatctctactaaaaatacaaaattagccaggcatcgtggcattcgcctataatcccagctacttgggaggctgaggcacaagaatcactttaacctgggaggtggaggctgcagtgagctcaggtaatgccaccccataccaggatgagcaacaagagcgaaactatctcaaaaataccataattttggggttcataggtcaacctgaaagggtggcagttttcatcacaatctctggtgcttctgagagcaacatgaaattgttctctacttcacaagggatggtgcattatgtttcagtgctgttgagggtaccttcacaggttgtgaggttatagtggaaatgataagtttttcggaattactgcattttaaaagggcttctactatgatccagacatggctgtgaaggatgaatacaaacagaaattctcaggaccttcttaattgaatcttatgtggctaaggtcactgctggagagaataacctaaagattttgttatttgtggtagtccttctagtctaattgacctaaaggtcattcctgcataggcaggaggaagaagaaagggagcagggatgtccattagaccactacgtggcccatcatgtgaccagccgtcattctttctgaatcatctggaaatggtctttattgttcgtcatgtttttgttaccatgaaggctagttgcctcactcaggttgaggagatgatacagcaatagttaataaacctcttggaaaaatcaagtccagatttttaaaattacatttttaaagctgtaataagaaataaatcacttttttttttctttgagatggagtctcgctcttgttgcccaggctggaattcagtggcacgatcttgggtcactgcaacctctgcctcccaggttcaagcgattcccctgccttagcctcccgagtagctgggattacaggcacctgccaccatgcccagctattttttgtatttttagtagaggtgaggtttcaccatgttggccaggctgttctcaaactcctggcctcaggtgatccgcccacctcggcctcccaaagtcctgggattacaggcattagccaccatgcctggccaaaataaatgactttcaaaaaaactgcacatatttatttttatttatatttatttatttatttgagacagagtctggctctgtcgcccaggctggagtgcagtagcacaatctcagctcactgcaagctccgcctcctgggttcatgccattctcctgcctcagcctcctgagtagctgggactataggcgcccacagccacgcccggctaatttttctatttttagtagagacagggtttcaccgtgttagccaggatggtctcgatctcctggccatgtgatccgcctgcctcggcctcccaaagtgctgggattacaggcatgagcccccgtgcctggccaaaactgcacatatttaaactgtaaagtgtgataagttttgacattaataagcctgtaatatgatccatcaccttcatatttacctggagtctggtaacgtctttacctctgccttccagatgaccattgataactttgctttataatagattattttacattttctacatttttatacgtgatttgatgtcgtgaagtgtttaatctttatccctggatggtatcgtgcggtatatttattttgagatttgtcagtgatgatacttgagtagttcactcctttttatattgctgagatgacatgctatgaaatatcactgtatattcattcatctgtttatacatcattaatctatttctcatttttggcttccataaataaaactacagacactttagtacagttctttatgtaaatatgtttcttttttatgtgttactatctgggggttcaataactgaatcagaataggtaaatctatagctttttgtttgtttgtctgttttgagatggagtctcgctctgtcactcaggctggagtgcagtgatgcaatctcggctcactgcaacctctgcctcgtgggttcaagcaattttcctggctcaccctccgaagtagctgggactacaggcacatgccaccatgcccagctaatttttttgtatttttagtagaggtgaggtttcaccatcttggccacgctggtcttgaactcctgacctcgtgatctacctacctcagcctcccaaagtgctgggattataggcatgagccactgcatccagcaaatgtatagctttttaggcaacaccaaagtgtactgtaaaattaatatggttgttccctttagtgttactgtcaccagtgtccatgaattccactttcatgtttttatcgatacagaatatggatagtctttttttttttttgagacaaagcctctctctgtcgcccaggatagagtgcagtggcgtgatctcggctcactgcaacctccgcctcctgagtttgagcaattcttctgtctcagcctccctagtagctgggactacagatgcatgccaccacgcccggctaatttttttgtatttttattagagacagggtttcaccatgttagccaggaggatcttgatctcgtgatccacctacctcagcctcccaaagtgctaggattacaggcgtgggccaccacacccggccaattttttgtatttttaatagaaatggggtttcaccctgttagctaggatggtctcaatctcttgacattgtgatctgcccgcctcaacctcccaatgttctgggattacaggtgtgagccaccgtgcccagcagagaatatggatagtcttttaaatttttacccttttttataagtggatgttccttctttagtaaaatgtctatttatatattttgcttgctttttaaattcttatttatttttagagaaaagatcttgctctgtcacccagccaagagggcagtagtttgatcatagctcactgcaacctcaacctcctgggctcaagcgtcctcccaccccagcctcctgagtaactgggactacaggcacatgccagcacacccaccgaatttttaaatttttttgtagagacaggatctcattatgttgctcaggctggccttaaactcctaggctcaagcaatcctctcacctcaccctctcaaagcactatgtctggcaactcattttcttcttctcaaatgtattttgcctatttccgttttcattaagaaataaaatatggttgggccagtggctcacgcctataatcctagcactttgggaggtcgaggtgggtagatcacctgagatcaggagttcaagaccagcctgaccaacatggtgaaaccccatctctactaaaaatacaaaaattagccaggcatggtggcgggctaatcccagctactcgggaggctgaggcaggagaatcacctgaacctgggagacagaatttgcagtgagctgagatggcacaactgtactccagcctcagcaacaagagcaaaactccgtctcaaaaaaaaaaaacaaaaaaaaaccaggggtcacatcattgacccttctctctctctccctcacctacaacatgcaaagatctacttgttcctttattaaaaatataggtagaatgtctccttttctcccatctgcacggcattcacctggtccatcaactcatctgaattatgctggtaaacttccctccgtgctaactgcctcctcattaatccaggagtctgttctcctccagtgtgcaaccagatagatcctatgaacatctggattagaccacctctttccccatccaagcatcccagcatctccaaaacagatgcccagcttttcaggcaaccacattacaggcctgaatcttgacccggcttcttgttcctatgagaaagaatagatgcctgtcgtacataggtcccagctcagtcacacctcaaagcatttgcacaaaatggtatgaattcctaaaatagctttctacacctgtttccattggttgccagaaataagaacacttctattaatccttggctggtactcaggactctgagcttggtgtatccacaggttctccacgccaagaactgggaaaacatcaagtgaacactcaagacaccataatctcagacaccacacaggtagtgtcaggttcagggagagactgggacactttctctttccctgtgttggcaccataagcattttcagtgttcagaacccatgaaaataaggcaactgtgaccagctccagctgatcaaacctccattgatccctacacaaccgtaaagccaggggccctggggctaactaattaactgatttcaatcctcagtgctccttcttaccacctatggcctagaaagaagactccacttctcagtgcctcattgtcctcatcatccttattccagtctgttctctgagaggcttttgtaaacttttaaagttctaccaaggacatgaccctcttctgttcacaaatctccatacatcccaggacactcagattgaaggcacaacccctaagacaaccaatacaggtgtgactctggctcatcttcagtttttactagggcctttttttttttttgagagacggggtctcactatgttgcccaagcctgtcttaaacttctggacttatgtgatcatgacacaacatggttaccaggttctgaaatgttcatggctcagatgcacctccaagcctttgcacctattggttcctctacctgtattactctacctggggtgaagcctgtaatacacagcatttacctgagctaggtccctcagtgtggctgctgccatcaactgtgggtggagtaggcatcaccccagccagtgcctatgagcctcagacctgccacttgggagcagagatgactactcctcttgtgccttctcagtcccaacccagtactccctggcctgacaagcatgcccagaaatccctcatcctgggccttgcaactagcaccttctgggtaaagtacttctcagagctctcagccaacaatggtggtatcctccaagagcaaaccgaatgcagaccatgttacactctgagggctgctggaaagccctgctcacacctcaagggaggaagactattgattctttgtaaaagcgtcaaataggtatcacataagactctaggaagctcatcctgcacccagagaataaaaaaactatttgagatgctcccaaactttacttatctaagtggccatatcattggcatcattcagacttacaatgtgtgcactcagagctgagaacattaagtattgattgctctttaaattcatgttacccaaattattacagtcagttttgtgagtttcattgttttgttgggaacgaaagaaaattgtccataagacataatgacaggatgggtacaaaaaacagttagaaaaaatgaataagaccgagtatttgctaccataacagggtggctgtagtcaaaataatttaatcatacatatgaaaatcactaaaagggtataattggattgtttataatacaaaggataaatgcttgaggtgatggagacaccattaaccctgatgtgattattacatatggcatgactacatcaaaatatctcatgtaatctacaaatatatacactattatatacccacaaaaaataaaaataaaggctgggtgccatggctcacacctgtaatcccaccacttcaggaggcctgaggtcgggagtttgagaccaacctggccaacatggagaaaccacgtctctactgaaaatacaaaatcagctgggcatggtggtacatgcctataatcccagctactcgggaggctgaggcaggacaatcgcctgaaccctggaggtggaggctacggtgagccgagatcgtgccattgcactccagcctgggcaacaagagcgagactgtctcaaaaaataataataaaataaaaaaataaaataaattgctggacacagtggctcacacctgtaatcccagcactttgggaggctgggggcaggcgcatcacgaggtcaggagttcgagaccagcctgaccaatatggtgaaaccccgtctctactaaaaatacaaaaattagccgggcatagtggtaggtgcttgtagtcccggctactcaggaggctgaggccggagaattgcttgaacccgggaggtggaggttgcaatgagctgaggtcacgccactgcactccagtctgagcaacagagctagactccttctcaaaaaaataaaataaattaaaaaaaaataataaagatgtaatgacagggaaatagacagatgttgatacaccctgaagcaggtagtgaagctggcagttggccactggttcccacagaaaattgctctagtgatgctagcaaatcccaaaattggggctcaatccaggaggattcctggcttcataaaggaaataattcaagagcaagccaagagtgtaaagtgaaggcaaagcaagtttatgagagcaagagaacaggaaaatggctgctccacagacagagcagggctactccacaggcaaagtagcacccgtggattgttggctagctatatttatagctactccttaattatgtgctaaataagaggtcggttattcatgaactttctagaaaaaggttggagagttcccagaaccaggggttccttctcttttaaactacatgaggtagcttctgggcattgccatagcatttgtaaacggccatggtgctggtgggagtgtcttttagcatgctaatacattataatgagcatataatgagcaatgagggcaactagaattgatgttcattgccatctcagtttcactgctttcagctggtttctttagtgcatcctgttttgaccagatcctgtttcatcatgagcagggtcatgaccactgctcagaaacaagtcctgctgacctatgtcactgtttgaaatgcttattcttcagtgccataaagaaatagcacttgaggccaggcatggtggctcacgcctgtaatcccgcactttgggaggccgaggccggcggatcacgaggtcaggtgatcaagaccattctgactaacatggtgaaacgccgtctctactaaaaatacaaaaaattagctgggcgtggtggcggtcacctgtagtcccagctactggggaggctgaggcaggagaatggcatgaacccgggaggcagagcttgcagtgagccgagatcgtgccaatgtactccagcctgggcgacagagcaagactccgtctcaaaaaaaagaaagaaatagcacttgaacatagatgtatttcataaggccatttttacttcctgcagaaagggtgcactcgccagcagttttgcaacaggagcacactgaacaaagaagacagggtcatttataacctgaggcgttcaccctcctgccggtttccattgcctggaacaggacctcatattctgtatgtgtcctgattggctagcaacttagaaccttttaagaggcaaaggtagaggagaacaaagaaaggaggaagtaacttgtggaatgctgagaaaggtaaaaacacttttaaataaggaagaggaacaggctatgacctaatgcttgcttggagcagtataagcatgtcagggcaaatatttaggctaaattgtcagagctaagaacataaagtacattgatttctttattatggctagcagatatttaagaatgctagcacaagtctttcaataaatttcgcttttaagagaagttactatttattcctaattagatggggaggaaagtctttgaagaggaaactgtactttacttttaacaatattccccctctttttatttcataattcctcttcaaacttatttaatgttttgacttaattgctttttttgtccttctaagagaagtaatttttttttaatagggaggaggagagttagcagttaactctgtaacagtggcagagacaagtttttgtataaaactttgaaggtagggaatattataacagcctacaagaataagtacactaataacaagagtgaacaaggtgagaattgaagttaaaatttctttttattcactgaactaatgttttattattttagaaaaggggttatttattttacaattcttggcaaatttatcggatagggctgttaaccttggtagcgcttttgttatagttctatcaggggcagtattattaggaacaaaggtacaatactgagttttgtataaaacatttaatttattggtctttgtggggaattagacgcattaccactctgttacaactgaggcattaattttgtagcttcaccaacattaattggtttgctttcatgacactgctgaggaatcaattctttctgcagaggttctgagttttaattatgacacaaacatctcctttttctgctaattatttaaagctattttatttttctacgccatctggctagtagatcctaattgcttagctatctgtttgatggtatcctcagtgtaatttatgaattgttggtgattgtaacatagcttagtctacatttttttatagttaccagaatgatgtggatttaaattctgcagctatttgattttgtgctttaaacttatcgggcacttctcacaggaccttaatagcatttatgtaaacctgaggattaaaggactcatacgtttttcttggcctgtggtgttttgtttttacctttgtagattgatgaaatgccaggatgaaggggatacccaattggattacagcacaagtactgctccaattatttggcagagtgtccagtaaaggtcttccacttaccactatacatttgtttggggatggctaagcatggactgatgggcaaagtcttggaaaggcttgagctctttccatcatcgtttaatgcttccaaggaacactaaattttcctcctgacctgagacgcacaaagtaaactttgtgcattcagcattcagcattcagaggtggaagccggattgccatagggggctgacctgcagggtgttaaatttcaggaaatagcagagagagctcagtatgttggattatcccaagcaatgggattttgaaaaagagccaccatacagtccttatctgagtggaaaggggataatctgggattctggcctactgtgcgtacaagtgtaataatcgcttttatttgaagtgctaatggattatttaatccatttcagccaggcatttgcatcttgatattttgtcttgacagcgaaggtctgtctgtcttagatctcttatttttacaagacaccttagttttaccagatgtaggagcaactggtgtgggatctagatctgaggcagcttaagaagggaaagatgagggaataatgtgtatttttaaaataactggggggtcttttttatttatgttaattttttttttttttttgagacggagtctagctccgtcacccaggctacagtgcagtggcgcgatgtcagctcactgcaacctccgcctcccgggttcaagcaattctcctgcttccgcctcccaagtagctaggattacaggcacccacctccgcgcccggctaatttttgtatttttagtagagatggggtttcaccatcttgcccaggctggtctcaaactcctgacctcaggtgatccaccagcctcggcctcccaaagtgctgggattacagtcatgagccaccacgcccagcctacttatgttaatttttataccatagaagcgactaagggcgtgtctagagttccttaaggtggaggtggtgataaagagaaagacagggttatattgacaaggctgacagtaagaaggggtagtccttttagtgaaatagatgaggggttttaggtctgcacaaacctttttgtggaagtctaactttgctattgggtagtttgagtgatgcagtcctatttactacaatgttgccaggcagtaggagcagaaaattggtgtcttggctgcaggtcattacaacaatgagtgctaggaataactgtgtcaattaaagggctgggatataaatatttgtgtgaaaaggctagctgctgttgatcttttacatttctacaaggtatgacaaagcaagcattaaaggcaatagtctgagtgagtcagacttagttacattaataacaaaggagctaataacagaataagaaaaggaagcagtatagaaggtatatgaaaattaatctttctttaacttagtagggcttgatcctagtacagtaacccatgattctgagaggaagatgttttcttgacttgagtgtggtgggtccatttttttttttcctcagctgtgtggacggcagtctcaggggttaacagcgtaaaatagggttcttcccaggctggtttgagttttttctttctagcttttgatgaggacgtggttttcaggctggtgctggtgtactggaaattctaggggtggtacctgtgctaaaagacttttaggtccgagggaagtgaaagtggaagataaattaagtataggatttttgctgcatattctggggccttaggcgtcatggtgtcacctcctgctccattcttgttcagcgccacccaggggaggctgcagccctgccccttcttaatgtcttggccttcttgtggccttcaccacccttgctcactgtggccttcaggatgaggggccttgtgacttacctggccatcttagggccttaagaaagctaaataccattgtatatttgtcaatttttttgtatgattttatatcaaataagttaaattttatctttagtggccaggcgcggtggctcacgtctgtaatcccagcactttgggaggctgaggtgggtggatctcctgatgtcaggagttcgagacaagcctggccaacatggtgaaaccccgcctctactaaaactaaaaagtaaataaataaataaatttatctttatattaatatgctactaatattaaacttaattttagtaagatcttatagacattatctaattttaatgtctgactataaggcaagacttttacagactgtttttataatttttgttaaagagcacgttggtgctttaagaaaaatctatcgtgctttaattttaacgtccagttcacagaaaaactggatgacacccttttaactttagccaatatgtttacacacagaatttgataccctcttaactttagccagtatgtttacacacagaatttccttgacaattaacattttaaaacttgcttaaacctttaaaacaaaaaaattgtcttaacctttagtgtaggtaaaaatccatattcttatgcctccttgtaatcttattaaaagtatattttatttttcttacataccttgtaaactgtttaataataattttatatccaggaggcctaattacttttaaattatacagtatttattgcatacattcccttttatagcttttcttacgactttcacaatcttcaacatgtcttaactttctgccttccttttacactatttttttcctagtttcacctcctttgtcttcttttgatttctgtctcttccagtttctctcttactctttccttctatttctttctctcatttgcactctattttccgctctctcatcccgtttccctttcttctccggacttctcccgctcctgccgcaagcagggctgggccaccgcacaggccccgcccccgaccccgcgctgctgtttttcttttttttccccctgatttcccctcttacttttttttttttccttttctttttacacttagtttcttgggctgagtgggatttgcgtggctgcagtctgggccccgggcagtcactagcctagaggcttggcagatatgcctgccgcaaattgcaagaattacgccttttcacctcctctgctctcctcccggagccggtgcccaccctctttttcacaaaccgcagggctggggagagggacttaacctttggcctgcctgcctggctgtttggctctgcgcttgctgtttttggtttctttctcttctactggtctttcctttgtctttgccagccacctatgctgctgttttctcctctgcttccctctcccctaggggagggaccggcaggagtggagctactgtttctttccctgagaagaaagaaaaggggagttctgaatatttttcttactactggaggtttgtgtgaggttcaacccccccaacaatagggatttctcacctctaagacatcctaaggaatactttaccacccctgcggtttttctctctttggtatgtcctaaccaaggaatgctttaccatcccggctttttccttagtcccgaccaccaaggaaatactttaccggctcctgcggcttctccttccttggtctgtgcacagttgtcattccattacatgaggatctttaagctaggttgctggccagttttttttttttttgcccccattgctgagagcccaggtttattcgtcacaccgggtgggtctcaatttcttacctatgaggaccttgcaatgaagtaggggagcgctaccccatgagagaggactggagaccgcccctagagaagaatgtatccccgtacggattgccaccaaattgtttgaaatgcttgttctccggtgccataaagaaatagcacttgaacataaatttatttagtaaggccatttttacttcctgcagaaagggtacactcagccagcagttttggcacgagagtacacaactaaggagatagggtcatttataacctgacgcgtccaccctactgctatgtccggtttccactggctgggatggggcctcacattctgtatttgtcccgattggcgagcaacttagaattttttttttttttttgatggagtctcactctgtcgcccaggctggagtgcagtggcaggttctcagcttactgcaagctccacctcccgggttcacgccattcttctgcttcagcctcccaagtagctgggactacaggctcccgccactatgcctggctaattttttgtatttttcctagagacggggtttcatgtgttagccacatggtcttgatatcctgacctcgttacccgcccgctttggcctcccaaagtgctgggattacaggcgtgagccaccaccccccaccaccgcccagccaatttagaaccttttaaaagaagcaaaggtagatgagaacaaaggaaggaggaagtaacttgtggaatgctgagaaaggtgaaaacacttttaaataaggaagaggaacaggctatgacctaatgcttgcttggaccagtataagcatgccaaggcaaatatttaggctaaattgtgggagctaagaacataaagtacgttgatttctttatgacggctagcagatatttaagaatgttagcacaggtctttgaataaattttgcttataagagaagttaccatttattcctaattagggaggaaagtctttgaaaaggaacctctactttactttttagttactatgaggatcactatatcaatgtttcttaattcatatgctaaagtgcactcaatttttttttttttttgagacggagtctcgctctgtcgcccaggctggagtgcagtggtgcgatcgccaattgccgctcaatgcaagctctgcctcctgggttcacgccattctcctgcctcagcctctggagtagctgaaactacaggcacccaccaccacgcctggctaattttttgtattttccctatagaaggcgtttcaccatgttagtcaggatgatctcgatctcccgacgtcgtgatccacctgcctcggcctcccaaagtgctgggtttacaggcgtgagccaccacgccctgccctcaatttcttttttcacattgacatctatctcaaaggaagagcaacttaaccaatgcctttgtggtacacatcagtggctacaactttcacaattacagcacagataaaaaaggcatctgaataacagcataaacatggcatctgagctccaaaatttcatctccttacaagaaagtggttattttccagtgactgcaggaatagtttcacactgggtactggcattatctcagaataaatgtttttgttttattttttttgagacagcgtctaactgtcgcctaggctggagtgcagtggtgtgatctcagctcactgtaacctctgttgcctgggttcaagtgattctcctgcctcagcctcctgagtagctgggattacaggcatgtgccaccacgcctggctaatttttgtatttttagtagagatggcgtttcactatgttggccaggctggtctcaaactcctgacctcaagtgatccacccaccttggcctcccaaagtgctgggattacaggcgtgagccaccacgcctggcctcagaatcaattacaggcgcagtggctcacgactcaggcctgtaatcccagcactttgggagtccaaggcaggcagatcatttgaggccaggagtctgagatgaacctggtaacacggcaaaaccccatctcttctaaaaatcaaaaaacagccagcatggtggctcatgcatgtaatcccagctatgtgggaggctcaggtgggagaatcgcttgaacctgggaggtagaggttgcaatgagccaaaatcacgccactgcactccaacctggtcgacagtctttaaaaaaaaaaaaaaagcagccgcacgcgatggctcatgcctgtaatgctagcactatgggaggccgagatgggcggatcacaaggtcaggagatcgagacgatcctggctaacacagtgaaaccctgtctctactaaaaatacaaaaaattagccaggcgtgtttgcgggcgcctgtagtccacaggactggctgaggcaggacaatggcgtgaacccggaaggcagagcttgcagtgacctgagattgccccactgcactccagcctgggggacagagtgagactccacctcaaaaaaaaaaacacaaaaaaacacaagcagcaactcaaatatccataaacggatgaatgaatatataatgacatttcatggcagactatacttctcagcaatatacaacaaattaactcatgtctacattgatatcaaaataagcatgatgcaggagagcacccagggattataagaggaaacactttattacatcagtcagaaaattctagaaaatggaaagtattatacagcagagtaaatcaatggttgtctgcatagagaaaaactttataaaggctccaggtgaatacaaaggtgatagattagataaattcattattgtgactctgatgatggtttcatgggattataagaaaattcaagccaggagcagtggctcacgcctgcaatcccaacactttgagaggccaaggcgggcagatcacgaggtcaggagattgagaacttcctggctaacagggtgaaaccccatctctactaaaaatacaaaaaaggtaggagtggtggtggttgcctgtagtcccagctattagggaggctgaggcaggagaatggcatgaacccaggaggcagggcttgcagtgagccgagattatgccactgtactccagcctgggtgacagagcgaggctgtctcaaaaaaaagaaaaagaaaattcaagacttatcctacagctcaaatatgcatactttattggatgtcatttatatattttatttttgaaacagggtctcactctgtggtccagactggactgcagtgttgcaatctcggctcactgcaacctctgcctcccaggctcaagcaaatcctcccatgtagcaatcctcccacatgacagctctcctgtgagttatgcagccagacttctggataaatatcctgtatttgtcacactagtaaggccttcattcagtgttaactataatcctgaaggaatacagaggtgtggctacaaaactgcccaaatttattttacttgtaaggactcttctctagtgtgaactctccaatatccaaggagagcagacctttgggtaaacattttccacatttgctgcaatcacaggatcttactcaggtgtgtattctccaatatttaatgagactggactcactgcactcataagccctttcttttgtgaactctctgatgatgacgaagtgaagagatttgcctaaattttttttcacattcactgcacccgtaaggcttttctccagtgtgaactctcctgtgtttagtgagactggagctttcggcaaaagatttcccacattcactgcactcataaggcttctgaccagtgtgaactctcttatgaacacggaatgtagagctgtgggtaaatgacttcccacaatcactgcattcatatggcctttctccagtgtgaactctctggtgtgcaatgaggtggtacttgtgcctaaaaaatttctgacaaacctcacactcatatggcttctctccagtgtgaattctctggtgtacaaggaggtgggacttactgttaaataatttcccacatatcccacacgtataaggtttttctctagtgtgaactccttgatgattactgaagctgtcatatttgctagaggatttcccacattcacaccacacagaaggttcttctgtagggagcagtctctcgtgctgactgagtatatctttggtgctaaaatgtttcatgcatcctccacagctgtaatggctttttcccccatgaaacagagacacacactcagttttgctgtttgacttcccagtgtgagtggcctcttgctggagtaatcctgacctgagcaaaaagtctttcccactctcactgaagacagatgactcccctgacacatgcaacttacacctcttcgcaaacaacgcctcctcaacactccctctgtagggtttctctccaatgtgctcattctggtgctgatgaaagtttccactgtcatacaatttattcccccaggcctcacacctgtgcagtttctgcttgtgatgtgttccctgatgatctgccacatgcaaaatgtctcccaagatcgggccacacatctcacaggggtgggccttcttgggagacacacctgccataggagtcctgacctgagtctctctttgtatataaatactctgcttagaaggtgccgcctcatcttccactccacaccaacaacctgaaagcaagaaaatgctggtgaagtgcatgttaactctggtgggaaggcacagaccacccacaagtgtatctgaaaaactgaggaattactccaaggaagtacttggaggaacaggatgttggcttcaggtggaagatggtgctatgtattattactggactataatggtcacagaatgtaggaggcctcataacataaaggacacaaccatgtatgtaacacagggagtagaggcagggtctacaatccctgcatctgcaaaccactcatctgcagaatttatgtcctcatgacatgcgagtgctgtagagagggatttgtccaggccaaggaaaacacaagcacaacacagcagcttctgcttgaggacagtttaacaaagtgtacacatttgctaacacaaaacctgtatgctaatactggaaaccactgcagatgaagatgtgaataaaattaagatgtgaggtccagagatgtgaagattattcaggggaataaatatcagactacaagctcatgtacaaatcagttaaaggatttaaaaaaaaaaaaagtacaactgacaaggagtacaactgacaattctgaggttcttaacaatggggaagaggccagtaccagtggctcacagctgtaaacccaatgtaggaagatcacctgagcccagaaatccaagaccagcctgggaaacatggtgagaccctgtctctacagaaattatttttaaaatggccaagcatggtgactcatgcctacaatcccagcactttgggaggctaaggcaaagggatcactcaggcccaggagatcaagaccagcctgagcaacacagcaaaacctctctacaaacattagccaggtgtgatggtgtgcacctgcagtcctagctactcaggagactgaggctggaggatcacttgagcccaggaggttgaggctgtgtgaactatattcacaccactgcactccaggtaacaaaaatgacagtgtgagaacctgtctcaaaaaagaaaagagaagaggagaggagaggggagggaaagggagaagagggaagaggaaagagaagagagaagaaaagggccaggtgtcgtgggtcatgcctgtaatcccagcactttgggaggcagagctgggcggatcacctgacgtcaggagtttgagaccagcctgaccaacatggagaaacactgtctctactaaaaatacaaaatattagcctttggggaaaagaaagagagatcagactgttactgtgtcgatgtagaaagaagcagacataagagactccattttgttcagtactaagaaaaattattctgccttgagatgctgttaatctgtaaccctactcccaaccctgtgctccagaaacatgtgctgtgtcaactcaaggttaaatggattttgggctatgcaggacgtgctttgttaaacaagtgcttcaaggcagcatgcttgttaaaagtcatcactactccctactctcaaggacccagggacacaaaacactgcctaggaaagccaggtattgcccaaggtttctccccatgtgatagcctgagatatggcctcatgggaagggaaagacctgacagcccgacgccagtaaaggggctgtgctgaggattagtaaaagaggaaggcctctttgcagttgagataagaggagggcatctgtctcccgctcatccctgggcaatggaatgtctgggtgttaaaacccaattgtatattccatatactgagataggagaaaaccgccttagggctggaggtgagacatgctggaggcaatactgctctttaaggcattgagatgtttatgtatatgcacatcaaaagcacagcacttttttctttaccttgtttatgatgcagagacatttgttcacatgttttcctgctgaacctctccccactattaccctattgacctgccacatggtagagataatgatcagtaaatactgaaggaactcggagactggtggcggcagggggaaggcagggttcctccgtatgctgagcgccagtcccctgggcccacttttcttttttttttttattttttattctttattgagacggagtctcgctctgttgctcaggctggagtgcggtggcacaatcgcggctcactgcaagctccgcctgccgggttcacgccattctcctgcctcagcctctccgagtagctgggactacaggcgcccgccaccacgcctggctaatttttttgtatttttagtagagacagggtttcaccgtggtctcaatctcctgacctcgtgatccgcctgcctcggcctcccaaagttctgggattacaagcatgagccaccgcacccagcccacttttctttctctatattttggatctgtgtctctttcttttctcaagtctctcattccacctgacgagaaacacccacaggtgtggagaggcaggccacccttcattagccgggcatggtggcacatgcctgtaatcccagctactcaggaggctgagggcagaattgcttgggcctgggagacagaggttgcggtgagccagatcgcaccattgcgctccagcctggacaacaagagcgaaactccatctcaaaaaaaaaaaaaaaaaaaaaaacaatggagaaggccaggtgcagtggatcatgcctgtaatcccagcactgtgggaggcaaaggcaggcggatcatgaagtcaggagtttgagaccagcctggccaatatggtgaaaccccatctctactaaaaatacaaaacatagccaggcgtggtggtgcacgcctgtagtcccagctacttgggaggctgaggcagaagaattgcttgaacctgggaggtggaggttgcagtgagccaagatcgcaccactacactccagcctgggcaacaaagtgagactctgtctcaaaaaaaaaaaaaaaaaaaaaaattagctgggcataatggcatgcacctgtattcccagcttctcaggaggctgaagcaggagaagtgcttcagcccaggaggcagaggttgcagtgagcagagatcaagctactgcactccagcctgggcaacagaacaagaccctttctcaaaaaacaaacaaacaaaaccaaaaacaagaatgaaggagaaaagacgatacagaaatcatgtgtgcttacttgtctggccccaaaaatactactgaaatagaagaggtttctgtcatgatttgaataaaactcttgacatcatgcaccactgtcctaggatgctatttttcagggactcagaacccataatgctgaggccagattcatttgcatcttctgaccacagaagatgatcccaccaccaagataaccaagtacatgagacatacatgatgtaagaacaaagggaaagacagaacaaggaaacagccaacactggcttagaacaactcagcacatgacagcagacaggaaacaatattacaaaaagaatttctgttttttgagacggagtcttgctctgttgctcaggctggagcgcagtggcacaatctcagctcactgcaacccctgcctcctgggttcaagctatcctcccaccttagcctcccaagtagccaggattaaaagcgtgtgccaccacacctggctaatttttatattttcagtagagatggggtttcaccatgtcggccaggctgttctcgaactcctggcctcaagtaatccacctaccttggcctccctgagtgcagaaattataggcatgagccactgcaccagacctatgaagagaatttctaaggacggtattacaagaacagtctatagtctatgtaggcagtgacaatgtcaatgaagacaattcctggcacagggaggcatgaagaaataacaggtagaggaatgaattagatcccgaacctgaaatctggatgaaatcacacaaacatccacaggacaaacaaggtagcctgcattaagttgcctgtaagacttctgactctgaattcttccctgggagctcaatagcaggtgttggggctgctccaagaatggagagggcagtatgcatacctcagtcctaccaaccaagaactgaagtaggaagctgtgtccatgctcctgacatgagaaagtcttgccaatagaaaaagagggggaaagacagagactagctcaggtcacaggggtgagtgtgggcaacttacccagggaggacataagtgccaggttctccagcgtcacatcacggtacaggcatctctgagcctcactaaggagattccattcctcctgggtaaatttcacagccacgtcttcaaaagtcactgtgccctgttatgatgttgacagatgaaaccacaaaccacccctatgctgaggtatcacaatccatctctcccacacatctactctcgcacatcctcctctcaaggtcctcaaacataggagaaactaggcccactggtcatggggtacagccaccaacaacaatagttagttgaacaaataggtatctgtgcggtggctgtgatataagagtccaccccctcctgacaggcacttcccctagtatggccgaggtcatggaaagcccaatgtggcaccttcagcacagcagagataccctctctgaacgcacctcattcttttttttttttttttttttttttttttgatacggagtctcgctctgtcacccagggtggagtgcaatggcgcgatctcggctcacgcaacctccgcctcccgggttcaagcgagtctgctgcctcagtttcccaagtagctgggattacaggcatgcgccaccacgcctggctaattttgtatttttagtagagacagggtttctccatggttggtcaggctggtctctacctccggaccaacccgcctaggcctcccaaagtgctgggattacaggagtgagccactgcacccggccccaccctccactttcttgtatgcgttccttaaatgcttctacagccataaaggcctgagggaagaggctgactttacaggactgtgtccctgataggatctggtaagctcaggcctccctgaacgcttttgtgtccacggagccaggtgaccttggactattgtctaacctgcgtgtctcagcacaaagtgtcatctctaccacctatatgatctacaaggattcaatctcaaagggccccaacgtcatcccctctctactctgttatttatttggcctttaggaaactttaaaagcctggactttgatccagtcccttctttcttggaaattctcctatttctagtgtcctcgcaatgatttcacagcccccagcctccttgcttttccaggaggagttccgcctcacaggttgttccctacaggcgcctgtggaccccaggttccatcctcccggatccgtccatctccaggccattgcccgcgcccctccctgtacctgtcgctctccccaccgcatcccacgggtgtctgaaacagggatccctcccgagagcgcctcagtgtcccgacgccgggtccgggttgcagagccgtaaacaggtgccgctccctcgctgctttaggacttgtgtgactaggaggtgaccggagagcacggaaggcgccacaattacctgaacggggaaccttagcgcggccgccgccatgggaccacgtggggtaagctgggttgagagcagcgggcgccgttaaagagctgcagagtcacgtctgtgcaaagagaagaacgactctcgacctcctggatccagtcaccaccacggtcccaacacagcgctccaaggactccctaacgccaatggaaatggtcgctactaaagggcgccgggagtcccgcctctaccttacttgcgcacacggaaacgccttcaatgtgaactctcactggctctgccgtgctgtcatttgacgcagagctttctgggtaatgtagtttcccaggttccaaggccgtaaagagagagattcccaggggcgcttcggaaggaaaagcccagctccacctccggggccctcagggaagcctcctgacccgcacggtggcgcgcgcctgtaatcccaaattttgagaggctgaggtgtcaggactgcttgagcccaggtggtccaggctgcactgagctatgactgcaccactgcactccagcctgggcgacagaacctgtctcaaaagaaaaagaaatgttaattaagcgtttgtgctgttaagggaggagaccacctctcatattgttttatgcccaatttctgcctccaaagaaacaagtaaaaactaaaaggcagaaatgaaatccacaggcagacagccaggtgccaaccctgggcctggttaaagatcgacccctgaccaaaccggttatgttatctatggattccagacattgtatggaaaagcattgtgaaaatccctgtcctgttctgttccgttctgattaccactgcatgcagcccccagtcgtgtaccccctgcttgctcaatcgatcacaaacctctcatgtggacccccttagagttgtaagcccttaaaagggacaggaattcctcacttggggagcttggtagttggagatgtgagtcttgccaaagctccaggctgaatacagccctgcggcttgtcctgctacatttcttggttccctgactgggaagccaggtgattaacagatagtcgaggcagccccttaggcagcttaggcctgccctgtggagcatccctacaggggactctggccagcttgagggacgcagaacctgagagcactcccgggtaggcaattgccccagtggaacacctcgccagagtggcgtgtggcaggcccccacagaggatcaatgcagcggctgaacactgggaaggaacaggcacttggagtccggacatctgaaacttggtaagactagtctttggaacttgcccactccatttgagtggaagggtggcctgatcacccacggcatgcctgtaccggcactttggtttttgtttttgacttgatttggattgcttgatactttcgttttggttttgacctggcttggatttctggatactctgatttggattttgattctggtttggtgtaaacggtaaaagtgtatgtgtgccctttttacctgttctttgttttgtggtgtgcgtgtggtgtgagcgtggtgttttgtctcaaagaagcatgggtcaggcacaaagtaagcccacttcactaggaactatgttgaaacatttcaagaaaggatttaagggagattacagtgttactatgacaccaggaaaacttagaactttgtgtgaaatagactggccagcattagaggtgggttggtcatcagaaggaagcctggacaggtcccttgtttgaaaggtattgtgtccagaattggttccttccggtgggttcttggtctcgctgacttcaagaatgaagccgcagaccctcacgggcagtgttaaagttcttaaagatggtatgtctggagtttgttccttcaggtgttcagatgtgtctagagtttcttccttctggtgggttcgtggtctcgctggcttcaggagtgaagtggcagaccttcgcggtgagtgttacagctcataaaggcagtgcgggcccaaagagtgagcaacagcaagatttattgcgaagagcgaaagaacaaagtttccacagtgtggaaggggacctgggcgggttgctgctactggctggccagcttttattcccttatttgaccccacccacatcctgctgattggtccattttatacagcgacagagtgagactccacctcaaaaaaaaaaaaaaaaaaaaaaagaagaatctcattttgaagccaaaaccatcagagtgaccattccaattatgtgctgagcataattccatctcttagacatcagtgctaacatttctctgaggccctaagttttttcaccatctactgatgtttcctcagaactacttctgtcagaactgttgaataattacctagtcagtgttttttgtttttttttttcacacagagtctcgctctgtcgcccaggctacagtgcaacggctcaatcttggctcactgtaacctctgcctcctgggttcaagtgattcttctgcctcagcctcctgagtagttgggatgacaggtgcgtgccgccacgcccaactaattttgtacttttagtagagacgaggtgtcaccatattggccagggtggtctcaaactcctcacctggtgatccacccgcctcggcctcccaaaatgctgagattacaggcatgagccaccatgcctggcctatctagtcagtattaataggctttcgtatcttgcattttacaactgtttctctcatgtaattttaatttttcatgcagaacactccctgctctcttaagataaatcaatgataatcacttcccatcaatgacatgaactcatggatttaacaaatgcccagtatgaccagatggagagcactacctttaaggactgtagctattaccactatcaagctaccaaatcctttattgttgtttatatatataaaactgacttcaaattcctaaaaggagttgaatataagttagaatatcaagtaaaggatactaagtgggtaaaagtgtggtgcaattaattgaatgctacaattgatttgtgaaccccccaaatgtgagacaggtctcagttcatttgaaaaatttattttgccggccaggcgtagtggctgactcctgtaatcccagcattttgggaggccgaggcaggcggatcacgaggtcaagagattgagaccatcctggccaacaaggtgaaaccactaaaaatataataattagctgggcaaggtgctgcgcgcttgtaggcccagttactcgggaggctaaggcaggaaaatcgattgaacctgggagacggaggttgcagtgagccaagatctcgccactgcacttcagcctggcgactgagggagactcaatctaaaaaaaaaaaaaagtttattttgccaaaggtgaggatgcatgcccgtgacacagcttcaggaagtcctgacggcacgtgcccaaggtggttggggcacagattgtatgttttgttttgttttgtttgagacggagtcttgctctgtcgaccatgctggagtggagtagcgcgatctctgctcactgaaagctccgacttctgggctcatgccattctcctgcctcagcctctctagtagctgggactacaggcgcccaccaccaggatggctaatttttttttgtatttttaccagagacggggtttcaccctgttagccaggacggtctggatctcctgacctcatgatctgcccacctccgcctgccaaagtgctgggattacaggcctgagccaccgcgccggctggtttaatacattttaggggggcatgagacatcagtgaatatttgtaagaattacatcggttctgaccagaaaggcggggacaactccaagcagggaggggacttccaggtcacatgtaggtgagagacaaatagttggattctttttagtttctgataagtgtttccaaaggaggcaatcagactatgcacctatctcagtgaggagagcaatgactgaatagaatgggaggcaagtttgccctgagcagttcccagattgacttttccctttagcttagtaattttgaggccacaagattttcctttcacagattctatcagcaggagagttgttttctgtaggaatcacagagattcagctttgcactcctgctgtaggggagcacatccctaacttccttcatttgccttaggcactctaaggcttctgagggccttcagacacattataacacaacaacgcttatcagcttctgcttccagtgcaggtattttgcgactgaacgactgtttcaaacggtgtggtaatttggatttttagcctttgggagaatcctaaataatagtttcagcttgagctccctattatttaccttgagctccccgaaatctgaagtagtatttttccaaattcttgagtgattagttacagacactagtctccaggaatctcaatacggcttctaaggctaggtgagacccctcctctgccctagaaaggcgccttttttttttttttttttttttttttgagacagagtcttgctctgtcgcgcaggctggagggcagtggcgcgatcccagctcactgcaaggaggttcacgccattctcctccagcctcagcctccagagtagctgtgactataggcgcccgccaccacgcccagctaactttttttttttgaatttttagtagacacggggtttcaccgtgttagccaggatggtctcgatctcctgacctcgcgatccgcccgcctcagcctccaaaagtgctgggattactggcgtgagccaccgcgcccggcctcagggcgcgcttttaaggagagttcctgacatgacggtgggcttttcctgcagatgcacctctgggtagcgccctctttacagccttgaaacctggtcaactacattactcagaaagctctgcgttgaatgaatgccgtcagagccaatgagggctcggaaagaagcatttccgtgtgtgcgcctaatgtagggccgagacttccggggtcctcttgtagcggccacgttgatctgcgatacgcgtgtttgcccagtgagtggccccggactgctacgtgggactgcggtgaatgaacccagaaggtggagaggaaccgttctcggtgcacagaggcggctctgcagcccggtgagggcgcctgctgctcccgggcagtgctttccccaagtagtccgatggctgcggctgcgccgaggcgccctactcaggtaattgtggcgttttctgtgccctcaggtcacctcatcgtcacccaggtcctaaaccagcgagggagaggctcctgctcacgggtctgtagccggtacccggcgtagggacactgaggcgctggcaggaggggtccctgtgtaaacgtccagtggattcaccttgccagctgcctagagagagccgatttgtgaagacaggggaattgtaaggagaaatagtaattcacgcagagccggctgttcgggagacaggagttttattattattcaaatcagtctccccgagcatttctggatcagagttttcaaagttaatttggcgggtaggggcttgggaagtggggagtgctgaacggtcaggttggagatggatttatagagggttgaagtgagtttttcatgctgttttctgttgtgggtgggatggcagaactgattgacccagattaccggtctgtgtgttgtcagctgatccatccagtgtaggatctccaaaatacctcaagcactgatcttagcttttacaattgttatgttatcttcaggagcaacttggcgaggttcagactcttggagccagaagctacatgacccctaaacggtaatttctaatcttatagctaaactgttagtcctgcaaaggcaggctggtccccaggcaagaagggagtcttttcaggaaagggctgttatcaattttgtttcagagtgaaaccatgaactgaattccttccctaagttaattcagcctgtgcccaggaatgaacaaggacagcttaaaggttaaaagcaagatggagtcggttaggtctgatttctttcactgtcataatttcctcagttataattttgcaaagacggtttcacctgtgtttgacatcagtgcgatgcggtggggagagcaacaggcacagggaggggcctaggcgatggtctggagatggaggcagctgggaggatggaacctggggtccacaggcacctgtcgggaacaaagtttgaggcagagctactcctggaagagcacacaggctgagggctgtgcattcatcatgaggacactagaagccatggagagttttgaagaaaggagggacatgatccaaatccaggcttttaagatttcccaaaggccaatcaaaggaagaacattgtagagagagaggatgaggactttggggccttgggaggttgaatcctttttgtagctcacataggtggtagagatgacattttgcactgagacaagcaggtcagacaaccagcctgagtgccacctggctccagggacaagaaagggttcagggaggcctgagcttatcaaatcccgtgacatgtttgtaatgtctgcctctcccctcaggcactcctggctgcagaagcacttagggaacccacacaggaaagtggagggtgttcaatcccctcattggtcctgacgccatctacaggttctctagcttgtggtgtcctgggactcttaagtgccatttttttcagtcctttgatccgaggaccctggagaatctctgaagccaggataccaagtccatgacaggttatatggaggtattcccatttctgtcaaccaatgtaaacacccttgtaagattaacccaggatttgctaccaggttgtgaaatgcttagagataaaacggatcaaagtcaggaggtgatattaccacagttctacctggctacaggcttcatctggttggaccttgttgcatagactgtgggttgagggaagaggaagaaaggtcagagataaggctcctgccataatctaggtgaggcttaatggatcagatatgtggtaaatcacatgggtctggattcaggattcactttttgtaaaaagacagctaggttttctttctttctttctttctttttttttgagacgcagtttcggtcttgtcacccaggctggagtgcaatggcatgatctctgctcactggaacctccgcctcccgggttcaagtgattctcttgcctcagccttccgagcagttgggattccaggcatgaaccaccacacttggctaatttttgtatttttagtagagacgaggtttcaccatgtcggccaggctggtctcgaactcctgacctcaggtgattcacctgcctcggcctcccaaagtgctgggattacaggcatgagacaccgtacctggcagacagctaggttttctctctctctcttttttttttttttttgagacggagtttgcttttgttgcccaggctggagtgcaatggcgtgatctcagctcaccgcaacttccgtcacccaggttcaagtgattctcctgcctcagcctccccagtagctgggattacaggcatgcaccaccaccctggctaattttgtatttttagtagagatggggtttctccatgttggttaggctggtcttgaactcccgacctcaggtgatccgcacgcctcagcctcccaaagtgctgggattacaggtgtgagccaccgtgcccggccgacagctaggttttctaatgtgggtgataagagcatgaaagaggaattgggcatgagcccaaggtttttgatctttgcagctgtaaccatggacgctgcatctgctgacatgaagttggtattgacaacaatattcactgtggatagcaagagggttgttttggccatatgaagaatcagagaccaataagtggtggcatcaaatggataactagacatacaggatgggatatctgggagggtgttgataatggagacatccaatatatgaaagctaatgagcgaactacagtaagttagttatgggtccatttaggaggacatgcttcagattttggtggtaaatcttttcaggggccaggaaggtgtgactacaggctgaggagtggatctcttacttacgtccctgagtgatgttattgggcttcctaaacacctgagagggtgtgagtgaccatcatggcaggatgtatcagacagtagagtttggaaggggacatagacatccgaggagagaatagacgagatagatgcatgcagaagcataggagtaattcagggaagatgacacttaggcctgagttggtgccaaagttgtaactatttatcactgtctggactcacaaacgttttgagatgactttgggagtgcctggggagtttcattcagcctggtgcatatgggcagtgaaaaatatgctcatctgtgatagtagatgtggtttggttcacaaatccaggggctgggctttaaacggcattaggtggacagaggagggttgctacagctgaggtctcagctggtgcagcacagaagtggaatagggccatggatatctaaagccatatgtggttctgtgtggctatggagtcattccgggagacattcacaggatgatttgggattaccactgctattgtaaaccatggaaattctgtgttaatattggatgctatttgtatttgtcaagcatagtctggatgtttatccacattttggtataaggccagaattgaaggcccaatatgatgtgtcactttgacatcttgtgatagtgggacaaccttaaaaggtgtgagcacaaatctcatctcattcccactctgctctcttgaataatgtatcctagcctaacaaccctttttatcaaggcaatgaggcagggttcctctgggggaaagaaagagagatcagactgttactgtgtctatgtagaaaaaggaagacataagaaactccattttgacctgtactaagaaaaattattctgccttgagatgctgttaatctgtaaccctagccccaaccctgtgctcacagaaatgtgctgtattgactcaaggtttaatggagttagggctgtgcaggatgtgcctttgtaaacatgtgtttgcaggcagtatgcttggtaaaagtcatcgccattctccagtctcgggtacccagggacacaatgcactgcggaaggccgcagggacctctgcctgagaaagcctgggtattgtccaaggtctcccccaactgagacagcctgagatgtggcctcatgggaaaggaaagatcttactgttcccccagcctgacacctgtaaagggtctgtgctgaggaggattagtgaaagaggaaggcctctttgcagttgagataagggaaggcacctgtctcctgctcatccctgggcaacagaatgtctcagtgtaaaacccaattgtatattccatctactgagataggagaaaaccgccttagggctggaggtgagacatgctggaggcaatactgctctttaatgcattgagatgtttatgtatctgcacatcaaaagcacagcacttttttctttaccttgtttatgatgcagagacatttgttcacaggttttcctgctgaccctcttgcctctattaccctgttgtcctgccacatccccctctccgagatggtagagataatgatcaataaataccgagggaactcagagaccagtgccatcagggttcctccgtatactgagccccggtcccctgggcccacttttctttctctatactttgtctctgtctcttatttcttttctcagcctctcatcccacctgatgagaaatgcccacaggtgtggaggggcaggccaccccttcactctctcagttatttttattacaccagtaatttcctcattgtgttgaatcttacagtggcttataaatcgatatgtacctagaaatgtttagccagttcatgtatatttgatgtatcacattttttcctttgaatcacatactctaaaagaagtaacttcctcttactaacctctgcttttcctaagtgatgaattaatcctctttagataattacaattctcttttcaacacttagcaagaactaatctataaagaagcactataaatctataaagaactttcccacccgggcacagtggctttggttcaacgcttctccaccttttggctaagatcaagtgtgagatggagtttcgctctcattgccccatctggagtgcaatggtgaagtctcagctcactgcaacctccgcctcccgggttccagtgattatcctgcctcagcctccggagtagctgggattacaggtgcctgccaccacacctggctactttttaatatttttagtagagacagggtttcaccgtgttggtcaggctggtcttgaactcctgacctcaggtgatccacctgcctaggcctcccaaagtgctgggattacaggcatgagccagtgtgtccggcccccagcatcattttcttcagagaatattcgaggaatctttttatggcttggcttcctttttttttttttttttttttaatttgagatggagtttcgctcctgttgcccaggctggagtgcaatcaatggcacgatctcggcccaccacaacctctgcctcccagttcaagcaattctgcctcagcctcccgagtagctgggattacaggcatgcacaatcatgcccggctaattttgtatttttagtagagaccaggtttctccatgttgatcaggctagtcacgaacgcccaacctcaggtgatccacccaccttggcttcccaaagtgctgagattacaggcgtgagccaccgtgcccggcaatggctgggctttcattgggtgtgaagtctacaaacagcatcttcaatttaaactgtcagttaaagttcttaagatttaggaaatgatggagcttggaaagttatgagattacaaaattccggaaagtccattagaaaaaccacaggatggaaaaaaaaataagccaggcaacaaagcttcagaggtccctgctggcccagggagagatacctgcagtgtccagcatctcagtgaacatgatctactttcaaaggcaggggcttaaagcgagggaagggggggaactggtggaagcaaaggctctccccatcaccaccttggttttaggtagggattttaatttaactgaaggacatctctcaacttggacaataattaatccctcaacagcacctcatatctgctatgactttgcagcgcagcagaaagaatgtttagtatctaatagataaaaatttcatcgaaaaaattaaaatattcttgcaacacccccccaacaccaattcctattctaaagtgaatctatcacttgtgctgttgatacttgaccatgtacttaattggaaacctagatgcaaaagactgaaactgaatcttcaccccaaaatgaaaacaaaataaaatgagtaacttgaggtttatggcatatagtttaggtaaacacacacacaaggagaagggggaagaggaaatggaaggtgtcggaagcaaagctgagtgacagaacacattcagtcagggcagatgtctatacagagtgtagtggaacctcaggaaaagcttcatatggattcatgcgcacgcgtctggaggcaccagatccctccatggcagatccaagaacagggagctgagggagaaggccattcccttcattccagttttaggagctccacatcgaagacgagagtggcgtgtggtgggatgatgcctgggtgcccagtggcaccgtaggcagaatctggagatatagtcagttgggctgtctgacccacactcatctaagcaaccctttcttcccagcctcggatcacctcctgctaaaaattaaggggcttgtttctgtcccgggaggaatcaaatttctttccatcttcaagcatcccggtgtagtgcaccacgcaggtctggccgtgcctcgggaaggtgcactcctctcctggggagatggtttccacctgcactcccatggcggcggccgatgctgggtgggcgggtagcgcgacgggcggtgtggaccaacagcgacctggcggcggttccacagctctggctagacccttggcttttatttatttatttatttatttattttttgatacagagcctctctttgtcacccaggctggagtgcagtggcacgatcttggctcacagcaacctctgcctcccggattcaagcgattctcctgcctcagcctccccagtagctgggattcatgcccagctaatttttgtatttttagtagagacggggtttcaccatgttggccaggatagtctgtagctcttaacctcgtgatcccctcacctctgcccagagtgctggggttacaggcgtgagccactgggcccggactttttttttttttttggccaggcgcggtggctcacacctgtaatcccagcactttgggagggcgaggcgggcggatcacgaggtcaggagatcgagaccatcctgactaacatggtgaaaccctgtctctactaaaaatacaaaaaattagccgggcgtggtggcgggcacctgtagtcccagctactcgggagggtgaggcaggagaatggcgtgaacccaggaggtggagcttgcagtgagccgagatcatgccactgcactccagcctgggcgacagagcaagactcaaatcaaaaaaaagaaaaatcgacccctgacctaatcagtaatgttatacagattacaaacattatatagaaaagcattgtgaaaatccctgtcctgttctgttccgttctaattaccagtgcatgcagcccccagtcatgtaccccctgcttgctcaatcgatcacgaccctctcacacagacccccttagagttgtgagcccgtaaaaggtacgagaattgctcacctggggagctcagttgttggagatgtgagtcttgccgaagctcccagctgaataaagcccttccttctttaactcggtgtctgaggggtttagtctgcagcttgtcctgctatacctacgatttcatctccaacccaaccaatcaggactgcccacttcatggccccctatctaccaaattatccttaaaaaaccccagtctcatgaggtggaggttgcagtgaaccgagatcatgaccttgcactccagcctgggcaacaggagcaaaactccatctcaaaaaaacaaacaaacaaataaacaacaacaaaaaaacccagtctccaagttttcaggaagactgatttgagtaatattaataagactccagtctgctgttcatccaactctgtgtgaatcaaactctttcttttacaattctcctgtcctgataaattggctctatctgggcagtgggcaaaatgaacccgctgggtgtttacacattcattttaacaatacaataatggttattaacctttgcattaatctctgcttccagtggaagaattttgcatcaaaggaccacttgaaatgataggtgaatttagatctatagcctttgggagcacctacactaactctgaaataatatttttccatacactagggtaatcagctacagctaataattgcaagaaatctcaataggagttttaaggaaaggcaggatgatcctctgcccagtagaaagatctgcaatcttttatttatttatttatttaattttatttttttccaatacagagtcttgctctgtcgcccaggctagagtgcagtggcacaatctcagctcaccgcaacctctgactcctgggttcaggagattctcctgcctcagcctcctgagtagctgggattatatgcatatgccatcatgccaagctaatttttgtatttttagtagaggcggggtttcaccatgttggccagactggacttgaactcctgacctcaggtgatccacccgcctcagcctcccaaagtgctgggattacaggcgtgagccacccacacccagcccttatttttattttttagagaagaggtcttgctctgttgcccaggctggagtgcagtggcacgatctcggcttaccgcagcttcaaactcctgagctcaagcgattctccctccttcaggctccctaaccctaaccccaaccttggggcagctgggaccactggcctgcctgacctcaccccactaatattttttattttttgcagagacaggatatggggaaaagaaatcagattgttactgtgtctatgtagaaaaggaagccataagaaactccattttgatctgtattaagaaaaattgttctgctttgagatgctgttaatctgtaactttagccccaaccctgtgctcacagaaacgtactgtattgaatcaaggtttaatggatttagggctgtgcagcatgtgccttgttaacaatatgtttgcaggcagtatgcttggtaaaagtcatcgccattctccattctctattaaccagggacacaatgcactgcggaaagctgcagggacctctgcctgagaaagcctgggtattgtccaaggtttcccccactgagacagcctgagatatggcctcatgggaaaggaaagaccttacatcccccagccggacacccttaaagggtctgtgctgaggaggaggagtgaaagagggaggcctctttgcagttgagataagagtaaggcttctgtctcctgctcattcctgggaatggaatgtcatggtgtaaagccaaccattcccattcgttgtattctgaaataggagaaaactaccctgtggctagaagcgagatatgctggcagcaatactgctctgttgctctttgctacactgagatgtttgtttaaagtgaaacataaatctggcctatgtgcacatccacgcacagtacctttcattgaacttattcatgatacagattcctttgctcacgtgtttccctgctgaccttctccccaccatcaccctgttgccctgccacactcccctcaccaagagagtaaaaataatgatcaataaatactgagggaactcagagaccggcgccggtgaaggtcctcacatgctgaatgtgccagtcccctgggcccactattctttctctatactttttctctgtgtctaatttcttttctcagtctctcgtctccacctgatgagagatacccataggtatggaggggcaggcccccttcaaacaggattttgctttgttgctcaggctaatctctaactcttggcctcaaatgatccttctgacttggcctcccaaactggtggaattacaggagctagccaccataccagtcagggcgcatatcttaaggatactcctgaggtggagctgggcttttcctgcagaaccgcctctgggaattgtgccctttaccctccttgttacctagggaactacattacccagaaaactccgcatggaatgacagagtggaagagccatgggggctcagaataaaggcatttcctgtgtgcacgtgacaatgggtccggacttccggcgccctctggtggcggccattttgattggtgttgggtttatttgtcggagaggctcctgagcgctaggtcggcactgcggtgactgaacccagaaggcggagaacagttgtcctctgctgcacagaggcgactctggagctctgtgacggcgccaagcgtgacccacccctgggccaggatagggaccgtcatgcccatatctcctggctggtcaccctctcctcccaaccctgctttaaaccacgtggttcgatggcggtggtggccacgctgaggctctctgctcaggtaattgtggtgccttccatgccctcaggtcacctcatcatcacccaaaagcctgtagtcttgcaaggaagagtctttaaggtggcagagccataggcagcagatgctgagtttttattaggagtgactgtcaggacagcccttttgagctgctgaaggcctaatcttttatagtcactgtacctgagcgagttagagaaaacgccacactttgagacgaattaagagtccgtttatttaaaaaaaaatccgtttatttagccggcggccaagagatgggtaacgctcaaagttctcgcggccccaaagaaggggctagattttcttttatactttggtttagaaaggggagggggggtctagttaaaacaattttacagaagtaaagtaggcaagaaaagttaaaaggataaatggttacaggaaagtaaacagttccaggtgcaggggctttaagactattagaaggtgatagatggggggctttgggcgttatcaatcagacgaattcctgggaactgcggatatagctcgccacagtatcttatcagttaattgcattcttggatgtgctgggagtcagcttgcacaagttaagtccttgaggaaggggctgccagtgaaagagccaagatggagtctgtctggctctcttatgtaagggagagtcaattcaggtggaaacaagtctaggtgattaaaggaaagggagaatctaaaaacagggttagtaaaaacaaggttgggcattacatcacagaatcctctagtgagaactgatagtggaacagtgtgctcgttggtgaccttacctcgttagatgcagtctttattttttatttttttgagacggagtttcactcttgttgcccaggctggatgcaatggcgtgatctcggctcaccgcaatctccgcctcctgggttcaagcgattctcctgcctcagcctcccgagtaggtgtcattacaggcatgcgccactgcacctggctaattttttgtatgtttagtagagatggagtttctccatgtaggtcaggctggtctcgaacacctgatctcaggtgattcacctgcctcggcctcccaaagtgctggggttacaggcgcgagccaccgagcccagcttattttatttatttattttttttttttttgagacagagtctcagtctgtcacccagcctggagtacagtggcgtgatctcggctcactgcaacctccgcctgccgggttcaagcgattctcctgcttcagcctcccaagtagctgggattacagacacccgccaccatgcccggctaattttttgtatttttagtagagacggggtttcgccatgttgcctagcctggtttcgaactcccgagctcaggcaatacgctcgcctcggcctccgaaagtgctgggattacagacgtgagccaccgtgcctggctgtctttatttttttatttgtttactaaacaaaacatcttaccctttatagcagagtgccctgtgaaatacaaattgtctttttctttttgtttttttttgagacagagtctcgctctatcgcccagactggagcgcagtggcacgatctcggctcactgcaagctccacctcccgggttcatgccattctcctgcctcagcctcccgagtagctgggactacaggcatgcactactatgcccggcttatttttgcatttgtagtagagacggggttccgccatgttggccagaatggtctcaatctcttgacattgtgatccgcccgccttggcctcccaaagtgttgggattacaggcgtgagccactgtgcccggccaattctatttaattattttaatttctttgctgaatttatctgatagaattctgaattttttctccgtgtttgtcttgaatttctttgaatttcctcaaaatagctatcttgaattatctgtctgaaaggtcacgtatctctgtttctccaggattcgtctttggtgctttatttagtttgtttggtgaggtcacgttttcctggatggtgttgatgcttgtagatattcgtcagtgtctgggcattaaacagttaggtgtttattgtggtcttcacagtctgggctcatttgtacctgtccttcttaggaagagtttccaggtatttgaaaggacccgggtgttgtgatctaagctgaatctactttagcgggaaccccacactcagtaatgctgtgactcttgcagactcagagagctgtaccacctttgtggtcttgaataagatctgaaagatttcccttgattaacataacaggtagagactcttgttgggtcttccctcactttgtcccagcatgtctctgtcagtgctgaagtgcctgaaactgggggttgggacagaagcacccctttagctaccaccactgggactgtgctgggtgagagctgaagccagcacagcactgggtttcacccaaggctcctgtgaccactacatggctatcgcctgtgttccctcaaggccctagccctgtacagtcagcaggtggcaaagccagacaggcttatgtccttctccttaggacggtgagttccccaggcctcaggttggtatacagatgccatccatgagccagggattggagtaaaaatccttagaaatctacctggtgttcctttgcactgcagctgagctggcactcaaactacaagctagagcccttcccactcttccatcccctttccacaggcagagcagcctcactctgtggccaccaccagcacgggcccacagggagtgctgtcagactaccactgaggttccattaagggctaagagctcttcagtcagcttgtggtgaatgttgcctggtctgaggctgactcttcaagactcacccagggcaggtccagcaatgtcatccacgagccaaggcctggaatcagggaccccaagaggcttcttggtgctctatccctctgtggttgagctggcagctgaggtgcaagacaaggtcccctttactttttcctctgttattctcaagcaggtggggtctctgaccgtaaccaccacagctggcagtgtgctgtgttacatctgaagctggcatgtctcagagtctcacccagtgccatcgcatactacctgggtactgctgctagttattcagggtccaagggttgtttagtcagaaggtgatgggtcctcccatgactgaattcttcccttcaaggcagcaggttctgttttggtccagagtgtgtctagaaatattatctgggtgggcctggaatgggtcctcacaaccctgcccagtgccctatcctgtggctgaggtgacatccaaaatgcaagacaaagttctttttgctgttccctctcctctcctcgagtggaaggaaggagccacgtagcctggggttgcatgaggggtggcacaagcacacccttagctacctcaactggtgtctcagtaggttgtgctcccccaacccaaccaggtcccctggctcggagcccagctcagcacagcacatgcctaggggttgcagtccttgtggcctcgaccgcctttcaagtttatttaggacttcagagccctccagcccacagtggcaaggcttgccagatctcaagtcctgaccattggggtgggcgattcccctctggctgggctggtcgctatgcttactccctgggtaggcgtccgttgagttcagcccagttttgctttctgctatgacagggaagcactgagttctgtgcaacgtctgacagtcactgcgctttcccttcccaggagcacagattctccacaacaggcaggcactgctgggggatggggaggagtggcattggcaactcaagactctacagccccttttagtgccatttccagtaatacaaaattaaatccaggtactgtgagtgctcatttgatttttggttcttacaaaggtgatttttttctgtgttgatagtgtttaaatttggtgttctgggccgggtgtggtggctcacgcctgtaatcccagcactttgggaggctgaggcaggcggatcaactgaagtcaggaatttgagaccagcctggccaacatggcaaaaccgtgtctctactaaaaatacaaaaattagtcgagtgtggtggcaggtgcctgtaatcccagctacttgggaggctgaggcagggagaattagggagaattgcttgaaccccggaggcagaggttgcagtgagccaaggtagcactactggactccagccctggtgacagagcgagactctctcttaaaaaaaaaaaagaaaaaaaaaaggtgttctgttaagggtatgatgggtgcagctttctattccaccatcctgctctgttgcacctctcgagctcagtcctttcaaccggaaacactagagaaaccctaaagcctaggccctaagtccataacgcaggtggtatggaggtattcccatttcagtgaaactgtgtaaacacttagaaggtcagccttggatttggtagcagtatgtgaaatgctcagagataaaactgatcagagtggggaggtgatgttacttctctgcctggctccacattggagaaaggaacatggggttaagggaggaggaaggaagacagcgttgaggctcattctgtcatccaggtgaggtttaatggatgattgttggccaaggagatgtcgctagaattgtgatttacatttggtaaaggagcagctagattttctaatgcggtcggtaaggacatgcaagagggtttcaggtatgacgctgggggttttttgtttttgctttttttttttttttaggtggagtcttgttctgtcaccaggctggagtgcagtagcatgatctctgctcactgcaacctctgcctcccaggttcaagcaattctcctgcctcagcctcctgagtagctgggaccacaggaggcacacggcatcacgcccggctaatttttgtaattttagtagagacagagtttttcaccgtattggtcaggctggtcttgaactcctgacctcaggtgatccacccacctcagccttccaaagtgctgggattacagactcgagccaccgtgcctggcaaccctaggggttttggccttagcagcagcagtgatagaagctgtatcagctgagatgagcaagttgggagtaggcataatacagtcactgggaatataaggagggttgttttcaccatgctcagaccctgagatgcttgtccacataggtcgggatatctgggaaggaattgatattggagacatccagtatatgatagctaatgtgtggactaaggtgcgttagccatgggtcccattttggagggcacacttcataataaggtagtaaatcttttagggaaccagaaaggactgattggaggctgaggactagatgttttgcctgggtccctggcggacattattggcattcataacctgtgttatgcattcacacaggagagggaggtaagtgacaatgaatgtagggtgtatcagagggcatagcttgtcgtggggcagacttccatggagataatagagatgagatgcaggcagaagtacagaagtaattgagggaaaggtcatcattgctgaggggctggcaagtgtagcacagaagtagaatagggtcatggatagctgaagccacacatggttctgtgtttctgtggagccatgcaaggaggtcctcacagaattacttgagaccaccgctccttttaggatccaatagaattgcaattctgtggtaatattggatcggtttgaatgggccatacactctggatggtgtcagctacgatgtagtgtaaggccaaaaattaaggcccagtgtgatttgccacctggatgcctggtcatattggtatgaccacaaatggctgagtgcaagtttctttcccatttaactctctttttatatatttaaaattttttctctcgtgtatgtatgtagaaacatggtcttgccttgtcgtccaggctgttcttgaactcctacgatcaagcagtgcttccacttcgacctctcagagtgctgggattacaggtgtgagacaccatgactggccacttcactctcttaagtaatatatctgaacgggtgcagtgcctcatgcctataatcctagcactttaggaggccgagatgggtggatcatttgacatcaggagtttgaaaccagcctgcccaatatggtgaaagaccatctctactaaaaatacaaaaattaaccaggcatggtggtacactcatgtaatcccagctactgaggagctgaggcaagagaattgcttgaacccaggaggcggaggttgcagtgagctgagattgcaccaccccgctccagcctgggtgacagtgagactccgtcataaaaaaaaaaaaaaaaaaaaaggaatgtatcctagcctctgaagcctttcgatcaatgaatgggaccaggcagagttcctgttatagtttgtagtgagtttcaattccatttttatctccagagttattcaaataagtcaatggcatcctcctgagggaatcaggccattacactctcttcatcttacaaagcttgcatgccatggccgtggttgctctcttttatccacaatccaacccccatgtggctctttgtggtgagtggtgtccctcttatcaggctgttaatatatgtgataccttttttttttttgaggcacaattttgcttttgttgcccaggctggagtgcaatggcgcgatcttgactcactgcaaccttcgcctccctggttcaagtgattctcctgcctcaacctcctgagtagctgggatcacaggtgcccaccaccacgctcagctagttttttttttgttttgttttttttttttggtttggttttgtttgagatggagtctcgctctgtagcccaggctggagtgcagtggtgctatttcggctcactgcaagctccgcctcccaggttcacgccattctcctgcctcagcctcccaagtatctgggactacaggtgcccgccacaacacccagctaattttttgtatttttagtagagacggggtttcaccgtgttaggcaggatggtctcgatctcctgacctcgtcatctgcccgtctcagcctcccaaagtgctgggattacaggcatgagccacgcccccggcctagtttttttgtatttttagtagagacgcagtttcactatattggccaggctggtctcaaactcctgacctcaggcgatccacccggctcagcctcctaaagcactggtactacaggtgcgagccaccacgcctggctcaatacatttgatttggaaactgctcttgacgacatctgtagaatatcagatgtcatttgttttaccaaaaatgtaaccctagggggagatttcaacccacactagtagaagacaaaggaggaaattaagatactttaagttggctggacacagtgcctcatgcctgtagtcccagcactttgggaagctgaggtgggtggatcacaaagtcaggagttcgagaccagcctggccaacatggtgaaatcctatctctactaaaaatacataaattagccaggtgtggtggtgcacacctgtaatcccagctgttcaggaggctgaggcaggagaatcctcaggagaacccaggaggcagaggttgcagtgagtctagatcgtgtcattgcactccgtctcaaaaaaaaataaaaaaaaaaagatactttaaattgtggccgggcacagtggctcaagcctgtaatcccagtactttgggaggccgaggcagatggatcatgaggttaagagatcaagaccatcctggccaacatgatgaaaccccgtctctactaaaaatataaaaattagccagatgtggtggcgggtgcctgtagccccagctacttaggaggctgaggcagaagaattgctggaacccaggaggcagaggttgcagtgagccgagattgtgccactgcactccagcctggcagcagagggagactccatctcaaacaaacaaacaaacaaaaaaagatactttaagttgtttaaaggccagagagaggccagtggtgtgtggcagtcagctggggatggacatggaatgtacctggaagtctaaagaatgaggtgcgttcagagagggtatctctgctgtgctgaaggtgccacattgggcttcccatgacctcggccatactagggaaagtgcctgtcaggagtgggtggactttatgtcacagccactgcacagatacctatttgttcaactaactattgttggtggctgtaccccatgaccagtgggcctagtttctcctatgtttgaggaccttgagaggaggatgtgcgagagtagatgtgtgggagagatggattgtgatacctcagcataggggtggtttgtggtttcatctgtcaacatcataacagggcacagtgacttttgaagacgtggctgtgaaatttacccaggaggaatggaatctccttagtgaggctcagagatgcctgtaccgtgatgtgactctggagaacctggcacttatgtcctccctgggtaagttgctcacactcaccctgtgacttgagctagtctctgttttcccctgtctttccccattggcaagactttctcatgtcaggagcatggacacagcttcctgcttcagttctatgggtaggttcttggttgtaggactgaggtgtacatactgccctactcctttcttggagcagccccagcacctgctttactgcaggctcccagggagggattcccagtcagaagcccaccttgttagtcctgtggatgtttgggtgtccttgtccagatttcaggttcctgtgtacccacagtctacttcctttctctagctgctattttcttatgccttcctgtggcaggaattgccttcacagactacatcactgcctatatagaccagaggctgttcttgcaagatcttctttagaaattctccttcaaatactcagtttttttctctcatgggctgagttgttctgagacaatgttggctgttcccttgttctgtctttcccttagtctgtgcatcattcatgtcccatgtatttggtcatcattgtggtgggaggcacagtcctccatttgatccagaagatgcaaatgaattcagcctcagcataataggctcagaaggagtgagtccctaaagagtggcaccctgggctggggatggtggctcgctcctgtaatcccagcactttgggaggccctggcaggtggatcataaggtcaggagttcaagaccagcctggccaagatggtgaaaccctgtctctactaaatataaaaaaatcactcgagcatgatggcatgtgcctgtagtcccagcgactcaggaggctgaggcagagaactgcttgaacccaggaggcagaggtggtgagcccagatcacgccactgcactccagcctgggcaacagagcgagactctgtctccaaaaaaaaaaaaaaaaaaaaaaaaaaaaaaaaaaaaagcagcaccctggaggaggtcatggagtcagggctttattgaaagcataccaggaacctattctactttagtagcatttttgtggcaagagaagtaggcacacataatttgtcttttcttcctcattcttgagaacatcacacttgtcacttgtctatcttatcatttctactcctttttttaagctttgacctacttgtacatgaactcgtaccctaatatccattctcctatctaatcttcacatctctggaccccaaatctcatccattttacatatgtcaccatttgcgtgttctccagtatttgcatagagatttgtgttagcaagtatatacgctttgttacaaactgtcctcaagcagaagctgctgtgttgtgcttgtgttttccttggcctggacaaatccctctctacagcactcacatgtcatgaggacataaattctgcagatgagtggtttgcagatgcagggattgtagaccctgcctctactccctgtgttacatacatggttgtgtcctttaacttatgaggcctcctacattctgtgaccgttatagtccagtaataatacatagcaccatcttccatctgaagccaacatcctgttcctccaagtagttccttggagtaattcctcagtttttcacatacacttgtgggtggtctgtgccttcccaccagagttaacatgcacttcaccagcattttcttgctttcaggttgttggtgtggagtggaagatgaggcggcaccttctaagcagagtatttatatacaaagagagactcaggtcaggactcctgtgacaggtgtgtctcccaagaaggcccacccctgtgagatgtgtggcccgatcttgggagacattttgcatgtggcagatcatcagggaacacatcacaagcagaaactgcacaggtgtgaggcctgggggaataaattgtatgacagtggaaactttcatcagcaccagaatgagcacattggagagaaaccctacagagggagtgttgaggaggcgttgtttgtgaagaggtgtaagttgcatgtgtcaggggagtcatctgtcttcagtgagagtgggaaggactttttgcccaggtcaggattactccagcaggaggccagtcacactggggagaagtcaaacagcaaaactgagtgtgtgtctccctttcagtgtgggggagctcactatagccatggagattccatgaaacattttagcaccaaacatatactcagtcagcaccagagacttctccctcgagaagaatgttatgtgtgctgtgaatgtgggaaatcctttagcaaatatgttagcttcagtaatcatcagagagttcacagtggaaaaagaccttatgaatgtggagaatgtgagaaatcttttagtcaaaagagcagcctcattcaacatcagcaatttcacactggaggaaaaccttatgggtgtgaagaatgtgggaaatattttagcttagaaggatatcttaggcgccatcaaaaagttcacgctggaaaagggccttatgagtgtggagaatgtgggaaatcttttagttcaaacgtgaaccttaagagtcatcagcgcattcacactggagagagaccttacaagtgtggagaatgtgagaaatcttttagtcggaagcccagccttagttaccatcagcgcattcacactgaagtaagaccttacaagtgtggagaatgtgggaaatcttatatttcaaaggggcaccttaggatccatcagcgcatgcacactggagaaagaccttacaagtgtggagactgtgggaaatcttttaatgaaaaaggacaccttaggagtcatcagcgagttcacactacagaaagaccttataagtgtggggaatgtgggaaatgttttagtcacaagggtaacctcattctacaccagcatggccatactagaaaaaggccttatatgtgttgggaatgtggaaaattatttaagaagaagtctcacctccttgtacaccagagaattcacagtggagagaagccatatgcttgtgaggcttgtcagaaattttttaggcacaagtgccacctcactgcacaccagagagttcacactggagaaaggccatatgaatgcagtgattgtgggaagtcatttacccacagctgtgcattcattgttcataagagagttcacactggtcagaagccttatgagtgcagtgaatgtgggaaatcttttgctgcaagctcctatctcactagtcacaggagagttcacactggtcagaagccttatgagtgcagtgaatgtgggaaatcttttgctggaatctccagtctcactaatcacaggagagttcacactggagaaaagccttatgggtgtagtgaatgtgaaaaaaaatttaggaaaagctcttcacttcgttaccatcagagagttcatgaaagaaaggccttatgagtgcagagaatgagtccagtctcattaaatacaggagagcacacacctgagtaagatcttgtgattgcagcaaatgtggaaaatgtttacccaaaagaagtctgctctccttggacattggagagttcacaccagagaaaagtccttacaagtaaaataaatttggcagttttgtagccacacctctgtattccttcaggattatatttaacactgaatgaaggccttactagtgtggcaaatataggctatttatccagaagtctggcttcaaaactcacaggagagctgtcactacggaaatgccttttgaatgtaatgtttgcaaaaaagcactgtgccttctgtcattgaatcctagaacactgagatgagaaaaacactgtagatgtataggttagatatatagggaatgttattattttttcctttttttggagagacggtctcactccatcacccatgctggtgtgcagtgctgcgatcgtagctcactgcatcctccgccccctaggctcaagtgatcttcccaccttagcctccatgtagctgggtccacaggcatgcaccaccatgcctggctattttctcatattagtagatatagggttttaccatgtttccaggctggtatcgaactcctgagctcaagcaatctgtacacctcagcctcccaaagtgctgagattgtaggtttgagtcactgtgctcagccaattatgtttttctgtgtaacatgggaggagatcctttgagggcaccatgtgcccaaattgaaaaaactccaggcatgtggcatctgtattatattttttactatgccctgttatcttgctagacttatgtgactgccacttatctggcaaaagccattacatctcagctacttggtaggtacccacattgcatcattcacctatttcgtattctagaagtatattttggttgtctcccattcacgagagattttttttttaagttttttgtttggttggttggttggttggttggttgtttttttttgttttttttttttttttttttggagacaaagtttcactgtcaccgatactggagtgcagtggtgtgatcctggttcattgcaacctctgcctcctgagttcaagcaattctcctttctcagcctcctgagtagctgggattacaggtgcctgccaccacacccaggtaatttttgtacttttagtagagatggggtttcactatgttggtcaaactgatcttgaactcctaacctcgtgatccacctgccttggcctcccaaagtgctgggattacagtgtgagcctctgcttctggcctttttaaaaattttttaaatttatattttttgtagagacagggtcttgctgtgttgcacagtctggtctcaaactgctggtctcgagtgatccttctgcctggcttcccagaatgttgggattataggcgtggcataagtcaccatgctgggacttttttatttctttaatttttaattccagatctggtcacagaaggatttgttgagtagcctcagcacttcttgctttttcatttctttctgataagttacaccatggaccttccccatttttgtcccagaggactcttgtgctgacttgaaaagatggactattttggctaagcatggtggctcatgcctgtaatcccaacactttgggaggccgaggtgggtggatcacaaggacaggaaggagttcaagaccagcctgggcaatatagtgaaatcctgtctcttctaaaaatataaaaattagccgggcatggtggcgcacctgtagccgcagctactcaggaggctgaggcaggaaaattgcttgaaccccgggaggtagaggttgcagtgagctgagatcatgccactgcactccagcctgggtcctgctaccttgaaggacagcatagctaaactgcgtggcccaagggacagcatgaatgcagaatatagctttcttcacttgtggcctatttgcatagctgcccaaggcctccagtggacgacttcatggctttgtggtcttcatctgtagcatggatactacagattgtgggttcataggtcagctgggtacagggcagtttttataacaacctctggtgggttttttattttagtgtcaatatcacactgaaagattggtgattttttttgaaccagacaaaattctctcttatgaggtatattgcactgtgctcggtactgttgagggaactctgttcagcagatcttacaaggcacacatgtgccatgatatccagaattctgtaaggcaacatcacaggttgtaaggctataggatgaaattataattttatggttacttagttactgcatttatagtcagcagaggggacagcaataaagtttttgaaatatatcttttttttttttttgagacacagtctcactctgtcacccaggctagagtgctgttgcaccatctcggctcactgcaacctgtgccttctgggttcaagcgattctcccacctcagtcacccaagtagctagaattacaggtgcatgccaccacaccactaatgttttgtggttttagtagagacgggtttcaccgtgttgcacagactggtcttgaattcaactcttgagctcaggtgatctgctcacctccgccttccaaagtgctgggactacaggtgtgggccgctgtgtttggctgaaatgtatgtcttttaaaggagtgtccacagttatccagtcactgtgtctgtgatggataagcagatacagaaattctcaagacttccataataatgaatgttgtgtagctaagctttggtcagaggaaataatctaaaggttttgtgaattcatgtaaccttttgggctgctcaccttaaggtaactcctgtattaacaggaggaacagaatagggaaaaagatctcagttcagtgatgtagctttgtgaccagccagtgatccagttcaatcaggtagaaatgaccttcctgctacatcaatatttgcttctatggaggctagtttccccacttagggcatgagaagaattggtaaagtcaacataaaattgccaaacctgtcaccaaaaatgatggcaaatctgtatttttctcttaaaccgtgttataaaagctgtaataaggtataggctgagcatcatggctcatgcctgtattcccagcactttgggaggccagattccttgagaccagtgtggggaacatggcaaaaccttgtctctaggaaaaatagccaggtatggtggcatgtaccttagtcttagtgatgtgggaggattgcttgagcctgggaggcagaagttgcagtgagctaagattgcaacgctgcagtccagcctgggtgatagagtgagaccccatcttaaaaataaaataaagatataaatgacatccaataaagtacacatatttgagctgtaggataagtcttgaattttattataatcccgtgaaaccatcatcagagtcaccataatgaatttatctaatctatcacctttgtatttacttggagcctttataaagtttttctctctgctcttcaaacaaccattgatttactttgctgtatgatggagtactttccattttctggaattttctgactgatgtaataaagtgtttcctcttataatccctgggtgctctcctgcatcatgcttattttgatgtcattgtagatatatgagttgttcattcgttttatgttgctgagaagtatagtctgccgtgaaatgtcattgtatattcattcattcatccatccatttatggatattttagttgctgcatactttttttttttttttttttcaagactctctaccaggttggagtgcagtggtgtgattttggctcattgcaacctccacctcccaggttcaagtgagtctcccacctcagcctcccacgtagctgggattacatgcgtaagccatcatgcccagctgttttttgtatttttagtagagatggggtttcactgtgttaccgggttcatctcaaactctgggcctcaagtgatctgcctgcattggcctacaaaagtgctcagattacaggcctgagccatgagccaccgcacctgtaattgattctgaggccaggcacgatggctcacgcctataatcccagcactttgggaagcgcaggtgggtggatcacttgaggtcaggagtttgagaccaggctggccaacatggtgaatccccatctgtactaaaaatacagaaattagccaggcatggtggcgcatgcctgtaatcccagctactcactcaggaggctgaggcaggagaatcacttgaacccaggaggcagaggttacagtgagctgagatcacaccactgcactccagcctgcgcaacagagtgagactctgtttcaaaaaagaaaaaaaaaaatttattctgagataatcccagttcccagtgtgaaactattcctgcagtcactggaaaataataaccactttcttgtaaggagatgaaattttggagctcagatgccgtgtttatattgttattcagatggcctttttaacctgtgctttaatggtgaaagttgtagcgactgatgtgtgtaccacaatggcattggctaagttgctcgtcctttgagatagatgtcaatgtgattaaagaaattgagtacaccttagcatatgaattaagaaacatattgacatagtgatcctcatagtgacatagatcagcaggacttgtgttctgagcactggtcatgaccctgctcatgatgaaacaggatctggtcaaaacaggatgcactaaagaaaccagctgaaagcagtaaaactaagatggcaagaatatgaactctagttaccctcattgcctcactgctcattatatgctcattataatgtattagcatgctaaaagacactcccaccagcaccatggccgtttacaaatgctatggcaatgcccagaagctacctcatgtagtttaaaagagaaggaacccctggttctgggaactccccactctttttctagaaaattcatgaataacccacctcttatttagcacataattaaggagtagctataaatatagctagccaacaatccacgggtgctactttgcctgtggagtagccctgctctgtctgtggagcagccattttcctgttctcttgctctcataaacttgctttgccttcactttacactcttggcttgctcttgaattatttcctttatgaagccaggaaccctcctggattgagccccaattttgggatttgctagcatcactagagcaattttctgtgggaaccagtggccaactgccagcttcactacctgcttcagggtgtaccaacatccgtctatttccctgtcattagatctttattattattttatttttttgagacggagtctagctctgtcgccaggctggagtgcagtcatgcgatctcagctcattgcaacctctgcctccagagttcaggcgattctcctgcctcagcctcccgagtagctgggactacaggtgtctgccaccatgcccagcaatttttttaacatgggttttgctgtgttagccaggatggtcttgatctcctgacttcatgatctgtccacctcggcctcccaaagtgctgggattacaggcgtgagcaaccgtgcccggctaatttttttatttttattagagatggggtttcaccatattggtcaggctggtctcgaactcctgacctcatgatccacctgactcagcctcccaaagtgttgggattataggcatgagccactgcacccagcaatttatttattttttattttttattttttttgagacagagtctcactcctgttgcccaggctggagtgcaatggcatgatctcgactcatcgcaacctccacctccagggttcaagtaattctcctacctcagcctcccgagtagctggaattggaggcatgcagcaccatgcctggaaaattttgtactttcagtagagacacggtttctccatgttggccaggctggtctcgaactcccgacctcaggtgatccacctgccttggcctcccaaagtgctgggattacaggtgtgagccaccatgtctggcctttatttttattttttgtgggtatatagtagtgtatatatttgtagattacattagatattttgatgtagccatgccatatgtgataatcacatagggtaaatggggtctcagtcacctcaacatttatcctctgtattataaacagtccagttatactcttttagttatttttaaatatataattaaattattttgactatagccaccctgttatggtagcaaatattaggtcttattcatttttgctcactgttttttgtacccatcctgtcatcatgtcttatggagaattttcttttgttcccaacaaaacaatgaaactcgcaaaactgactgtaatgattcagtctacgtgaatttaaagagcaatcaatacttaatgttctcagctctgagtgcacacattgtaagtctgaatgatgccaatgatatggccacttagataagtaaagtttgggagcatctcaaatagtatttttattctctgggtgcaggatgagcttcctagagtctgatgtgatacctatttgatgcttttacaaagaatcaataatcttcctcctttgaggtgtgagcagggctttccagcagccctcagaatgtaacatggtctgcattcggtttgctcttggaggataccaccattgttggctgagagctctgggaagtactttacccagaaggcgctagttgcaaggcccaggatgagggatttctgggcatgcttgtcaggccagggagtactgggttgggactgagaaggcacaagaggagtagtcatctctgctcccaagtggcaggtctgaggctcataggcactggctggggtgatgcctgctccacccacagttgatggcagcagccacactgagggacctagctcaggtaaatgctgtgtattacaggcttcaccccagctagagtaatacaggtagaggaaccaataggtacaaaggcttggaggtgcatctgagccatgaacatttcagaacctggtaaccatgttgtgtcatggaaagtggggaactacattacccagaaagctctgctttaaacgacagccggtcagagccagtgagcactcggaaagaaggcatttccacgtgtgcacgtaacgtaaggccgagacttccggggtctctagtagcggctgtgtatcggcgatgcgggtgtttccccagtttgtggcccctgagtgctgggtgggaccgcggtgactgaacctagaaggtggagaggaatcgtcctcggtgcccagaggcggctctgcagccccgtgacggcgaccactgctcccgggccgtgcttccccaagtagtccgatggcagcggctgtgccgaggcgcccaactcaggtaattgtggtgccttctgtgccctcaggtcaccccatcgtcacccaggtcctaaaccagcgagggagcggctcctgctcgtgggtctgtagccggtacccggcgtaggaacactgaggcgctcacaggaggcctctccttgtaaccgtccagtgggttcacgttgccagctgcctagacagagccgatttatgaagactggggaattgcgatggagaaatagtaattcacgcagagccgtcctgctgttcgggagacaggagttttattattcaaatcagtctccctgagcattctgggatcagagttttcaaaatttggcgggtaggggcttgggaagtggggagtgctgatcagtctggttggagatggattcatagggggttaaagtgagtttttcatgctgttttctgttctgggtgggatggcagaactgattgacccagattaccggtctgtgtgttgtccgctgatccatccagtgcaggatctgcaaaatgccccaagcactgatcttagatattggggaaaccagccccacaccacccagcagataccccgagtcctgcggagacaaaggagttagaaagagacagaatacgcatttaaaaggcgggtccaggtggccagagcattggaggcttcctggcggcccagagctcttgggctccacccagtttattggtttacaagctctttgttcttatggctgattggagggggaggaagcgatcaggaaaaggattaatcagtaaaggagaactcgtgagtcattccataagatgtaaagcactggccgtttctgtgaatttccttgaacaaaggcgtgtgtctaaactacttaagatctttaacttaactgaaacgggtggctgcgggtttcaggaggagccaagatgtttgattatgctccactgcttcaagggagtgtgatctccctgagcaacccatggaatgctgctgaagagttatgctctcggggcataaagacatgaaggcaataaggagacttttctcctcagaggccgcccatggcttcccatgggtgtctcacacaggggagaccaactcaactagcaccccagaaactcacattaggttttacaatagtaaggttatcttcaggagcaacttggggaggttcagactcttggagccagaagctgcatgacccctaaaccgtaatttctattcttgtagctaatttgttagtcctgcaaagacaggctggtccccaggcaagaaaggggtcttttcaggaaagggctattatcaattttgtttcagagtgaaaccatgaactgaattcttttccaaagttaattcagcctatgcccaggaatgaaaaaagacggctgaaaggttggaagcaagatggagtcggttaggtctgatttctttcactgtcataatttcgtcagttataattttgcaaagtcggtttcacctgtttctgacaccagtgggatgcagtggggagagtgacaggcacaggtaggggtgcaggcaatggcctgcagatggacagagctggaaggatggaacctggggttcacaggcatctgtcaggaacaacgtgtgagatggagctcttcctggtagagcaagcaggccaggggctgtgcattcatcatgaggattctagaagccatggagagttttgaagaaaggagggacatgatccaaatccaggcttttaagaagtttcccaaaggccaatcaaaggaagaacatcatagagagagaggatgaggactttggggccttgggaggttgaatccgttttgtagatcacatagatggtagagatgacattttgcactgagaaaagcaggtcagacaaccagccttagggttacctggttccagggacaagaaagggttcagggagtcctgagcttatcaaatcctgtgacatgtttgtaatgtctgcctttcccctcaggcactcctggctgcagaagcacttagggaacccacacagggaagtggagggtgttccattccctcattggtcctgacgccatctacaggttctctagcttgtggtgtcctgggactcttaagtgccatttttttcagtcctttgatccgaggaccctggagaatctctgaagccaggataccaagtccatgacaggttatatggaggtattcccatttctgtcaaccaatgtaaacacccttgtaagattaacccaggatttgctaccaggttgtgaaatgcttagagataaaacggatcaaagtcaggaggtgatattaccacagttctacctggctacaggcttcatctggctggaccttgttgcatagactgtgggttgagggaagaggaagaaaggtcagagataaggctcctgccataatccaggtgagggttaatggatcagataagtggtaaatcacatgggtctggattcaggattcactttttgtaaagagacagctaggttttcttttttttttcttaacgtggaatttcagtcttgttgcccaggctggagtgcaatggcgcaatcttgggctcactggagcctctgcctcccaggttcaagcaattctcctgcctcagcattcaaggtagctggcattacaggcacccaccatcatgcccagctaatttttgtatttttagtagagacgaggttttaccatgttggccaggctggtctcgaactcctgacctcaagtgatcgtcacatctcggcctcccaaagtgctgggattataggcatggaccaatgcgcccagccgagacagctaggcttttttttttttttttttttttttttttttgagacggagtttcactctcttgtccagcctggagtctagtggcacaatctcagcccactgcaaccttcacctcctgggctcaagtgattctcctgcctcagcctcctgagtagctgggattacaggcatgtaccaccacactcggctaatttttctatttttagtaaagtcggggtttcaccatgttggccaggctagtctcaaactcctgacctcaggagattcgctggcctctgcctccccaagtgctgggattataggcacgagccaccatgccttgcagacagctagattttctaatgtggatgataggagcatgaaagaggaatcgggcatgagcccaaggtttttgatcttagcagctgtaaccatgcacactgcttcagctgagatgacgttggtattgacataatattcactgtggatatccagagggttgttttggccatatgaagaatcagagaccaataagtggtggcatcaaatcgataactagacatactggatggggtatctgggagggtgttgatactggagacatccaatatatgaaagctaatgagtgaactatgattagttatgggtccatttaggaggacatgcttcagattatggtggtaaatcttttcagggggcagaaaggtgtgattacaggctgaggactggatctcttacttacgtcctcaattgatgttattgggcttcctaaacacctgagagggtgtgagtgaccatcataacaggacatttaatacagtagagtttggaaggggacatagacatccaaagagataatagagaagagatagatgcatgcagaagcacaggagtaattcagggaagatgacacttaggcctgagttggtgccaaagttgtaacttttttgtttttttttttttttcagatggagtttcgctcttgttgcccaagctggagtgcaatggtgccatctcggctcactgcaacctccacctcctgggttcaagcaattctcctgcctcagcctcccaagtagctagtattacaggcacctgccaccacagcaggctaatttttgtattttcggtagagacagggtttcaccatgctgaccaggctagtcttgaactcctgaccgggtgatctgcctgcctcggcctcaaagtgctggaattgcaggcgtgagccactgtgcctggccagttgtaactatttatcactgtctggactcataaacattttgagatgactttgggagtgcctggggagtttcattcagcctggtgcatatgggcagtgaaaaatatgctcatctgtgatagtagatgtggtttggttcacaaatccaggggctgggctttaaacggcattaggtggacagaggagggttgctacagctgaggtctcagctggtgcagcacaaaagtgaaatagggccatggctatctgaagccatatgtggttctgtgtggctatggagtcattccaggagacgttcacaggatgatttgggattaccactgctattgtaaaccatggaaattctgtgttaatattggatgctatttgtatttgtcaagcatagtctggatgcttatccacattttggtataaggccagaattgaaggcccaatatgatgtgtcactttgacatcttgtgaaagtgggacaaccttaaaaggtgtgagtacaaatctcattcccactctgctctcttgaataatgtatcctagcctaacagcccgttttatcaaggtgataaggcagggttccaggttgttatattttgtggtgggtttcaattccatccctaccagcagagttatggaaacaaaccattgcatattcccaagggaatcatgggccgttataccctcttcatcttgtgaaataattttatttgtaggcgctgggtgtggtggctcacccctataatctcctcactttcagaggccaaggctggtggatcacttgagaccagaaattcaagaccagcctggccaacatggtgaaaccccgtctctactaaaaaaaaaaaatacaggccaggcatggtggctcaagcctggaatcccagcactttgggatgctgaggtgggtggatcaggaagtatggagatcgagaccatcctggctaacacagtgaaaccccgtctctactaaaaaaaaaaaaatacaaaaaattagccagctgtggtggtgggcacctgtagtcccagctactcgggaggctgaggcaggagaatggcctgaacctgggaggcagagcttgcactgagctgagatcatgctactgccctccagcctgggggacacagcaagactccgtctcaaaaaaaaaaaattagccgagtgtagtggtacatggctgtaatcccagctacttgggaggctgaggcacaagaatcacttgaacctgggaggcggaggctgcagtgagccatgattgtgttcctgcactccagcctgggtggcagagctagactatgtctcaaaaaaatcccccaaaaataaacttttacttctggggatgccagagaggggctgaaggttggggaaactctggtgggggtggccatgggcatgtgtctgtacagtataaagaatgatatatatttaatgagagcgaggttgtctgatggactcaggcagctgccttgggctttacgtgaccttggatatcgctgttcagaagggggtgtgggctttttttgttttttttttttttgagatggtgtctcgctctgttggccagggtggagtgcagtggtgtgatctcggctcactacaaaccccgcctcctgggttcacgccattctccggcctcagcctcccgagtagctgggactacaggtgcccaccaccatgcccggctaattttttgtatttttagtagagacagggtttcaccatgttaaccagcatagtctctatcccctgactgcaagatctgcccgaatcagtgtcccaaagtgctgggattacaggcgtgagccaccgcacccagcccagaagggagtggacctttttatgtcaggacctcagcatggatacctatttgtccacctacttcttgttgctgatggcatttgaccagcaggcccatgaagagacaaaggcaccagtggatgtggtttcaactccgtgttggggaccttgggaggaggatgggcaagggtgggtgtgtgggagaggtgggttgtggtacctcagcagaggggctgcttgtggtttcatctgtcactatcatagcagggcactgtgacctttgaagatgtggctgtgaacttttcccaggaggagtggtgtcttcttagtgaggctcagaggtgcttgtaccgtgatgtgatgctagagaacctggctctcatatcctcgctgggtaagttgctcacgctcacctttgtgacctgagctagtgttactgttcccctgtttttcattgacaggactgtctttctcacctaaggagcctggacacaggttccttctgcacttctctgtgtaagttgtgtggttcgtaggagtaaggtgtgtgtattgccttttcctctcctgttttttttttttttctgagacagtgtctcgctctgtcacccaggctggagtacagcggcgccatctcggctcactgcaagctccacctcccgggttcatgccgttctcctgcctcagcctctcaagtagctgggactacaggcgactaccaccacgcctggctaattttttttgttttttagtagagacgaggtttcaccgtgttagccaggatggtcttgatctcctgacctcgtgatccacctgccttggcctcccaaagtgctgggattataggcgtgagccaccacgcccagccaccttttcctctccttaagcagctccaacacctgctttgctccaggctcccagggaaggagtcagagtcaggagtcttataggcaccttaatgtatccactttgcctgcctctggctgtcaggtgactgtccaaatcggtagctcttgtgtgcccaggttctattaacacttccttcctctatctgacaatgctttgtgcctccctgtgccaagaattgccttcattgacattgtcactacctacatagaccatagaccatagactcttcttgcaagaccctgcttaggaattcttttgtaatacttaccttactctcctgtgggctgtcaggtgcttagttgtcctgagctagtgttggctgttcatctctgctatctctcctttcatagttacatcgtcgggtcctatgtactgggtgtgagatggagagtcctccatgtttgacaagatgtggttcaattcaggctcatcacgataggctcaaagggagcctgtccctcaggagtgccatgctgggggagggcatgacttcaggggtttatccaaatcataccagaaaccatttacatttgccaagtatttttggggcaatatgagtaggcacacactatttgtctttttctccccattgttgagagtttcacatgtgttagttctgtaccttttcatttctgcagtgatatccaccccagcactaatactcacatttctggactccacatctcacccatttttcttttgctttcatctgcagttgtctctgatattggtgtattgattacgtattaggaagtgtatgcccatggttaaaccatctatgaccacccctgctgtgttgtactcatgttttcttggtcttcacatgtttctatatatatatagatgtatatatatgtgtgtatgtgtatatatatatatgtgtgtgtgtatatgtatatttttgagagagagttttgctcttgttgcccaagctggagtgcaatggtatgatctcggctcagtgtaacctctgcctcctgggttcaagcgattctcctgcctcagcctcccaagtagctgggattacaggcacatgccaccatgcctgactgactttttgtatttttagtagatacagggtttcactatattagccaggctggtctcgaactcctgacgtcaggtgatctgcccgcctcggccttgcaaagtgctgggattacaggagtgagccaccgtgcccggcccatattcttctatatagcactcacatgtcatcaggagataaggtcctgtacacaacttgtttgtagaggaaggagctgtagaccctgcctctactccctgtgttgcatatatgcttgtgctctttacatcatgaagcctcctggattctgtgacctttatagcccaggaattctaagaagccccatctttttttttttttttttttttgtgattgagtctcactctgttgtccaggctggggtgcagtggcgtaatcactgctcactacaaacctctgccttctgggttcaaatgattctcctgctttagcctcccgagtagctgggattacaggtgtccacaaccacatccagctaatttttgtatttttagtagagatggggtttcaccatgttgttcatgctggtcttgaacttctgacctcaggtgatccacccgcctcagcctcccaaagtgctgggattacaggtgtgagccaccatgcccagccagcagccccatcttcaacttgaagccaacattgtgttcctgcaaatatttctatagattaattcctcaatttgtgagacgtacttgtgggtgggctgtgccttcccgccggaggtactttgcacttgaccagcattttcttgctttcaggttgttggtgtggatcaaaagatgaggaggcaccttgtaagcagagaatttctgtacaaagagagtctcagagcaggactcctagggcaggtgtttctcctaagaaggctcacccctgtgaaatgtgtggcctcatcttggaggatgtttttcactttgctgaccaccaggaaactcatcacaagcagaagctgaacaggagtggagcatgtggaaaaaacttggatgacactgcataccttcatcagcaccagaagcagcatattggagagaaattctacagaaagagtgtcagagaagcatcgtttgtaaagaaacgtaagctcagggtgtcacaggagccatttgtcttccgcgagtttgggaaggacgttctgcccagttcaggattgtgccaagaagaagctgctgtagagaagacagacagtgaaactatgcatggcccaccctttcaggagggaaaaactaattacagttgtggaaaacgcacaaaagccttcagcaccaaacactcagttattccacaccagaaacttttcactagagatggatgttatgtgtgcagtgattgtggaaaatcctttagcagatatgtcagcttcagtaatcatcagcgagatcacactgcaaaaggaccttatgattgtggagagtgtgggaaatcttatagtcgaaagagcagccttattcaacatcagcgagtccacactggacagacagcttatccctgtgaggagtgcgggaaatcttttagtcagaagggcagccttattagccatcagcttgttcacactggagaagggccttatgagtgtagagaatgtgggaaatcttttggtcaaaagggtaacctcattcaacatcagcaaggtcacactggagagagagcttatcactgtggggaatgtgggaaatcttttcgtcagaagttctgctttattaaccatcagcgtgttcacactggagaaaggccttacaagtgtggagaatgtgggaaatcttttggtcaaaagggcaacctcgttcaccatcagcgaggtcatactggagaaaggccctatgagtgcaaggaatgtgggaaatcatttaggtacagatcccacctcactgaacaccagagacttcacactggggaaagaccttacaattgtagggaatgtgggaaattatttaacaggaagtatcatcttctggttcatgagagagttcacactggagaaaggccatatgcgtgtgaggtatgtgggaaattatttggcaataagcacagcgtgactatacatcagaggattcacactggagaaaggccgtatgaatgcagtgaatgtgggaaatcatttctttccagctctgcgcttcatgttcataaaagagttcattctggacaaaagccttataagtgcagtgaatgtggaaaatccttttctgaatgttccagtctcattaaacacaggagaattcacactggagaaaggccttatgaatgcaccaaatgtggaaaaacatttcagcgaagctctaccctccttcatcatcagagttcacacaggagaaaggccttatgagtgcagtgaatatgggaaatcgtttgctgaagcatcccgtctcgttaaacacaggagagttcatactggagaaaggccttatgagtgctgtcaatgtggaaaacatcagaatgtctgctgtcctcggtcttaagcgacttcgtgttgagatggagtcttgttctgtcacccaggctggagtgcagtggtgcagtcttggctcgctgcaacttgggcctcctgggttcatgcaatcctcctacctcagcctcctgagtagctgggattatgagtacacaccaccacgcccagctaatttttgtgtttttagtggagatggggttttaccatgttggccaggctggtctcaaactcctgacctcaagtgatccacccaccttgactcccaaagtgctgaaattacaggcatgagcctctgcacctggccttcattcttttcgtattgcttagaatatgacatgctgaaccaggcatggtggctcatgcttgtaaacctgatgctttgggaggacaaggtggttcattggaggccaggagttagagatcagcctgggcaacatagccagacctcctctctacaaaaagaaaaaagaatgacatgcttcttgtttttgtctgttataaatgaaactgctatatttgaatgcagttgttcatgtaggtatgtttcactatggtaatatggtggtgtgcagtgcctgagtcacgtgatagattaaagtacaactcttttttgagacagagtctcactctgtcacccaggcgggagttaggtggcatgatttcggctcactgcaacctctgcctcccaagttcaactgattcttctgcctcagcctcccgagtagcagggattaccggtgtgcaccaccatgcctggataacttttttttttatttctattagcaatggggtttcaccatgctggccaggcttgttatgaactgacctcaagtgatctgcctgcctcagcttctcaggtgtgacctactgtgcttggcctaatgtacaactttttaagcaatgccaaactatgacttaagaatgaaattattgctcatttgtatatctatctaccatcagtgtccaagaatttctgttctatcttaccaagagggagtatggttagtatttgaaattgtttattattttaataagtggttataacttttgagtcagtggtttatgttttgcattttttttgttttgagacaaagtctcgctctgtctcccaggctagagtaccgtggcacaatctcagctcattgcaacctctgcttcctgggctcaagcactctgcccacctcagcctccagagtagctggaaatacaggtatgcaccaccacaactggataacttttgtattttctgtagagagggttttacctttttgcccagtctgatcgcgaactcctgggctcaggcgatccacttgcctaggctccaaaagtgcttggtctacaggggtgaggcaccctgcctggcctcacctgtaggcttgttttttaaaatgaattttatctatttcccatttcattaatatatttaaaaataatgaaataacaaagacgtatgttggacttcattcattcttcagtgatgtcactttgctgcaaggaatatttggttttcttttttttttttttttccagatggagtctagctctgtctcctaagctacagtgaagtggcatgatctcggcccactgcaacctccacctcctgtgttcaagcgattctgcctcagcctcctgagtagctgggactacaggcatgtgccattatacctggctaattttatttatttattttagtagagatggggtttcaccatgttacccaggctgctctctaccttctgagctcaagtgatccacctgcctcggcctcccaaagtgctgggattacaggtgtcagccactgtacctggctgaatacttggttttcagtaccacaagaactatgagctggttatccacttcatgtggaatcataagcgtcccaaagtgacaatacatatagattgccaggcagtgaaacagttaagatgccaccatagctttcttttcaacatctttctaagattaccttactatttcttttgttccaagtttgtacttcctcacagttctcacatatggaaaggatacacactttgtagaaacaagaactttatgttatccaagttctaggatagccatgagctccaattatctcagagctctgagtcctctactcaatacccattgagatttatgtgttctgaggcttttgtcttctagctacttacttcattctccatgggtaacgtcattcatccacattaactaatttcctcactccaagctcttttctagagataatctccagtccctgtgcagaaactgtcattgcactttctgctgaaatggcagtttcttctcagcaaggtgagattatggaatccagaatcttttttcaggggtcacatgcccatttccccacttgcatgaatgtcgacactgcagccacagttttggccgtaaatgtgaatttggcaagtaaccactgttcccagggaaatgtcccaatcagaagaagattatctgggacactgatactgacagggagatgggacattctgagggacccggaggcagggtgccacctcctcaacttccctgagggctgcctagaatctgtttcctctcactctgaattattcttcctcttatggctgaccaaaaacatggaacctcacaaagtccactgtaacagctttatatttgtgaagtgaagaacatgaagacagtttcaagcaaagttattgagtggacactttgtgttttttttgagaagtctcactctttcacccaggctggagtgcagtggcacgatctcggctcactgcaactccacctcccgggttcacgccattctcttgcctcagcctcctgagtagctgggaccacaagcgcccaccacgtcagcttaatttttttgttttgtttcttgagacagagtcttgctctcttgcccaggttggagtgccgtgtcgcaatctcagctcactgcaacttctacctcctggattcaagcacttctccttgcctcagccacctctttagctgggattacaggtgcgtgccaccacacccagctaatttttgtatttttagcagagaccaggtttcaccatgttggtcaggctggtctcaaactcctgacctcgtgatccacccacctcggcctcccaaagtgctggaattacaggcgtgagccactgcacctggcctgtattcttttctttagtagagacggggttttactgtatttgccaggatggtctcgatctccagacctcgtgatccgcccgccttagcctcccaaagtgctgggattataggcgtgagccaacacgccctggccacttcttgtctttgcaacattttttagatatgtatttgtgttttttggggagcttaatttgctaatggaatctctgttattttcctaacatgcttggtggatacaagagttaagacttcctgtcccgtttagtgtaacaaaagaaagttaagaaatgtggataaaagattgtaagttagaaatggcaagataatcagctatatgaagaatcttggccaggtgtggtggctgaggcctgtaatcccaccactttgggaggctgaggtgggcggatcacaaggtcaggagttcaagaccaccctggccaatattgtgaattcctgtctctactaaaaatacaaaaattagtcgggcatggtggcgggtgcctgtagtcccagctactcgggaggctgaggccagaaaatcggttgaacctgggaggtggaaggtgcactgagccaatatcacaccagtgcactccaacctggtgacagagagacacatcatctcaaaaaaaaaaaaaaaactcaatccataaatgttatactttataactttataacagcatgttatatgggcttagatattatccctaaatttttttttttttttttttttttgagacagagtctcactctgtcacccaggctgaagtgcaatggcatggtctcggctcactgcaacctccgcctcccaggttcaagtgattctcttgcctcagcctcccgagtagctgggcctataggttccctccaccacgcccagctaatttttgtatttttagtagagatgggctttcactacgttagccaggctggtctcaaactcctgacctcatgatccacccccctcggcctcctaaagtgctgggattacaggcatctgccaccgcactcggcttatccctagaaatcctatgatagcatgatgtataggcacctaaaggcatggcacttgagaaatgtgaataagattgtaagttacaaatagcaaggtacagtcagatgttaacagtctcagcccctaaatgtcaccttgtattacagcatgttatataagcacatacaggcacatacatgaaatagtgatacttcattctcagtaatatcttcatccttctcactggaaagatctttgatgatttttaatcaacataggagtttcaatgatatctagaagtttaaaagggctcgttcaaacaaattatgaccacacacactgaagagtatgtttgtctcttgtggtgtaaatttttttttattacaccaaattatgttcacacaaaacctttgtaatcagggggaattaaagagccttcctggaaaatggaggttgcaatcagccgagatggtgccatcgcactctagcctggggaatagagtgagatcctgcctcaaaaaaaacaaaaaaattctttattttctccataaactacagtttatataagcaaaagtttcagtactaagcaattttagtctctgcagtctcttgtcttgaattaatacaacttttgttaattctcttatgaagttaatcttcctgcttgtatgtgaattaaatatatgtcaaactttttttgtacaaaagattcatacctctttcctgtttgaaattattttactgtgtttcatcaatctaatgtttatttttattacaccagtaatttcctcattgtgttgaatcttacagtggcttataaatctacatgtacctagaaatgtttagccagtccatgtatatttgatgtggcacattttttcctttgaatcacatactctaagagaagtaacttcctcttgctaacctctactttccctaagtgttgaattaatcctctttagatgattataattctcttttcaatagctagaaagaatctataaggaactttcctggctgggtgtggtggctcatgcctgtaatcccagcacttcaggaggccgaggtgggtggatcacgaggtcaggagttccagaccagcctgaccaacatggttaaaccatgtctttactaaaaatgcaaaaattagcacctgtaatcccagctactcaggaggctgaggcatagaattgcttgaacctggcaggcagaggttgcagtgagttaagatcgtggcactgcactacagcatgggcaacagagcaagactctgtctcaaaaaaaaaaaaaagaaatcacagtccatgtctgaggggtgtacattgcttatcaatttggagagaaaataatagataatgtaatacaatgttaaaatagattaaaaattgagatagaaaaactgctcaatttatgcttcacataaaattgaaaattaaatcaagcctacacataaaggcattttttatatatatacatatatgtgtgtgtgtgtgtatatgtacacacatatatacgtatatatgtgtgtacatatacacacacacacacatactttttatgttatttttggagagaatcttgctctgctgcccaggctggaatgcagtagcatgatcatggctcactgcagccttgaccacccccagggttcaagtgatcgtgccacctcagcctgctgggtagctgggactacagacaggcaccctgcctggctaatttttgcattttttgtggacacagggttttgccatgttgcccaggctggtctcaatctcctcggctcaagtcaacagcctgcctctgcctcccaatgtgttgggattacaggaataaactactatgcccaactcaagattattttttaaatggtttattttcttagtaaattggggtgcacaagtcattaaaagcaaggattaaatttaaagggaaaaatttgttttacttttctacagaaaattaaaaccaaagcacattaaaagtgacaacacggccgggcacagtgactcacacctgtaatcccagcactttgagaggatgaggtgggcggatcacaaggtcaggagatcgagaccatcctggctaacacagtgaaaccccatctctactaaaaataccgaaagttagccaggtgtggtggcacgcacctgttgtcccagctactcaggaggctgaggcaggagaatggcatgaacccaggaggcggagtttgcagtgagccaagatcaggccactgcactccagcctgggcgacagagcgagattctgtctcaaaaaacaaaaaagcaacaacccaagatggaaatgacaaaagttacttaaaatgtgcaacataaaaggtagtcatttaggctgggtgcagtggttcatgcctgtaatcccactttgggaggccaagacaggtgggtcacttgaggacaggagttcgagaccagtcaggccaataccgtgaaacagtctctactaaaaatccaaaaattagccggatgtggtatcatgcacctgtaatcccagatgttcgggaggctgaggcatgagaatcgcttgaatgcaggagcagaggttgcagtaagctgtgatcatgccattgccctccagcctaggcaacagagctagatccttgtcttaaaaaaaaaaaaaaggaaaggagtcatctataattttactacttatacagattacattgagataaatcgcaaaatattaggcaaaactttaaaacaatttttaactatccagtatatcaaagagagatgccacacattgtatttgtttgcaagaatgtcattgtgattacaaaactgaccactaaccattcagttgaagttgattgagaacttaaaactatttccgtctatggccataccaccctgaacgcgcctgatctcgtctgatctcggaagctaagcagggtcgggcctggttactacttggatgggagaacttaaaactatttccttttttttttttttttgagatggagcctcactttgtcgcccaggctggagtgcagtggcgtgatctcggctcactgcaacctccgtctcctgggttcaagtgattctcttgcctcagcctcccaagtagctgggattacaggtgtgtgccactaagcccagctcatttttgtatttttagtagagacagggtttcaccatgttggccagagccaccgcattatttttcagccaggtgcagtggctcacacctgtaaccccgcactttgggaggccaaggtgggtggatcacctgaagttgggagtttgagaccagcccgatcaactttgaagaaaccgtctctactaaaaatgcaaaaacctagccgggcgtggtggcacgtgcctgtaatcccagctactcgggaggctgaggcaagaggatggcttgaactcaggaggcagaggttgtggtgagccgagatcacagcactgcactccagcctgggtgacaagagcaagactccgtctcaaaataaataaataaaaataaaaaataaacatgatgatcacagatgcagtcacattttctgagttcttgtctctctgccagtgccacccagatagcctcacaaaactttgacccagccactgttagtgtcgccaccgcccataaaggagctgagcccagcaggggcactgcctggggccctgtagccaaaaggctacagcaggagctgatgaccctcatgatgcctggtgacaaaagaatttctgcctaccctgaaagccttatcaaatggacaccatccatgaagcagctggcacagtgtatgaagatctgaggtataagctcttgctggagttcctcaatgactacccacctttacgatgcacccacagtgaagttcctcacaccctgctaccaccctaacgtggacacccagggtaacatatgcctggacatcctgaaggagaagtggtctgccccgtatgatatcaggaccatcctgctctctatccagtgcctgctaggacaactcaacattgatagccctttgaacacacatgctaccaagctctgggaaaaccccatagctttaagaagtacctgcaagggtcaggcgcagtggctcacacctgtaatcccagcactttgggaggccgaggtgggtggatggatcacctgacgtagagagtccaaggcctgacaaacatggagaaatgtcatccctatttaaaaaaataaaaaaattagccaagtgtggtggcgcatgcctgtaatcccagctactcgggaggctgaggcaggagaatcacttgaacctgggaggtggaggttgcagtgagccgagatctcgctattgcactccagcctgggcaacaagagtgaaactctgcctcaaaaaaaaataaaataaaataaaaataaaaataaggaagtacctgcaagaaagctactcaaagtaggtcaccagccaggagctctgacccaggctgcccagcctatccttgtgttgtctttttaattttcccttagatggtctgccctttccgtgatttctgtgtagaactctgtatcttgagctgtggtactatttttcttttgtcttttaatttaaaccttggtggagcccttgtgatgaatattaaatacatacattttgggctgggtgtggtgcctctagcctataatcccagcactttgggaggccgaggcaggcgaatcgtgaggtcaggagatcgagaccatcctgcctaacacggtgaaacctcgtctctactaaaaatacaaaaaaattagccgggcgtggtggcgggtgcctatagtcccagctgctcgggaggctgaggcaggagaatggcatgaacccgggaggtggagcttgcagtgagctgagattgcaccactgcactccaggctgggcacagagcaagactccatctcaaaaaaaaaaaaaaaaaaaagacaaaaagaaaacattttggtcattaaaaaacaaaaaaaaaatgatacgagagagcacccagggattataagaggaaacactttattacatcactcatctaacattccagaaaatggaaagtactctactgtacagcaaagtaaatcattggttgtctggagaacagaaagaaagcctttataaaaaggttccaagtaaatataaaggtgttaagttcattattgtgactatgttaatggtttcatgggattatatgaaactcaagatttatcacatgctacagcttaaatatgcatagcttactgaatgtcatttataactcatcacagctttaaaatatacttcagactggcagcagtggctcacacctgtattcccaccactctgggaggctgaggcaggcatatcacctgaggtcaggagtccaagatcagcctggccaacatggcaaaactccgtctctactaaaaatacaaaacttggccgggcatggtggcacatgcttccagtcccacctacatgggaggctgagccaggagaattgcttgaacctaggaggtagaggttgcaatgagccaaggtcatgccactgcactccagcctggctgacagtgagactctgtctcaaaaaaaaaaaaaaaaggttgggcacggtggctcatgcctataatcccagcactttgggaggccaaggcaggcggatcacgaggtcaggagatcgagaccatcctagttaacatggtgaaaccccatctctagtaaagatacaaaaaattagctgggtatggtggcgggcacctgtagtcccagctacttgggaggctgaggcagaagaatggtgtgaacccaggaggcagagcttgcagtgagccgagatcgtgccactgcactccatccagcctgggcaacagagcaagactccgtctcaaaataaataataataataattaaaaaaatgcagttcaaaagaaaaatatagatttaccattatttttggaaaacaggtttggcaactctatactgactacaccaattcttctcatgccctaagtgggaaaactagcctccacggtagcaaatattgatgtggcactaaggccatttccacctgattaagtggctggctggtcacaaaggccacatcactgaactgagatctcccttctccctatcatcttcctcctgttaatgcaggaatgaccttgaggagaacagcccagaatgagtacaggaattcacaaaacctttagattatttcctctgacaatggcctcaacaatacaatattcatcattatggaagtcctgataattcctgtatctgcatattcatcatatacgtagtgactggatcattgtggatgcccttttaaaagacatgcattacgctgcacgtggtggctcacctgtaatcccaggactttgggaggctgaggccagcagatcacaaggtcaggagttcgagaccagcctggccaacatggtgaaaccccatctctactaaaaatacaaaaattagctgggtgtggtggcatgtgcctgtagtcccagctactcaggaggctgaggcaggagaatcgtttgaacctgggaggcagaggttgccgtgagccaagattatgccactgcactccagcctgggcaacagggtgaggctctgcctcaaaaaaaaagaaaaaaaaagaaaaaaaagacatgagttgcagttacattattctgtctcctccactgcctataaataaagtaattctataaaattataatttcacctgatagcattacaatctgtgatgttatcctacagaattctggatatcagggcatgtgtctgcattgcaagagctgggcaacagacttccctcagccgtaccaagtacaatgcaatatacctcgtaaaagaattttgtcttgttcaaaaaatgccagaaattgtcacaaaaaatgccctgtatccagctgacctatgaacccacaaattttagtatccgtgctacagataaagaccacaaagccctgaaggtcttctctggaggcctctggcagctatgcaaagcagtccacaagtggagaaagctacattctgcattcatactgttccatgagccacaaagtttagctatgccaacaaaagctgtgacccccttcatagtaacaggacctacttatttctgaaccacccatacagtgacaacaaccctcaagattgaagaaggctgaaacaataaggccttcataatagcacaaaccggagaaatgggaggcaagctgttcttaggatcatgacttggagggtagaaaatttgtcaagattgatgtgatacccacaagatctctgaaagacatagtccgtcttttcaagtcaacgtaagaggcctctgggataaaaatgggtaacgtccatggcatgacttatcagacagaaaaaaatgacaaaggaagaagtgctgaagctactcaacaaatccttctgtgactcgatcagaaattaaaagttaaaaaaaaaaaaaaaaaaggccaggcacagtaactcacacctgtaatcccagcatgtttggaggccaaggtggaaggatcgcttgagccaggagtttaagaccagcctgggcaacatggtgagaccctgtctctccaaaacttaaaaaaattagtggagcatggtagtgcatgcctgtggtttcagctactcaggaggccgaggcaacagaatcacttaagcccagatcaagggtgcagtgaaatgtgaacacaccactgcacgccatcctgagcgacacagtgacaacctgtctcaaaaaaaatctagcaaggtacctgggtatagtgaaaaatgcactgtagctgccacacacttggaacttttgcagatgctcaataaatgacattcaatctaggtaggtggcactctcaaagggttacattgaaaaagaaataacattccatatacatctatggtgtttttctcatgtcaatgtttgaggctccaataaaaaggctgaaggctttcttgcattcattacattcaaaaggcatttctgcagtgggaagtctcctgtgtgttatgaagctagatttctacataaatatctcacatgtcacactggtaaggccctgatccagtgttaactctgatcttgaaggagcaaagaggtgtggctacaaaattgcccaaatgtattttatttgtctagtgtgaactctctgatattcaaggagaaaagaccttcaggtaacttttttcccacatttgctgcaatcacaagaccttactccagtgtgaactctcctgtgtttaatgagactgaaagtttcagcaaaggatttcccacattcactgcactcataaggtggtgtgaccagtgtgaactctcttatgaacacagaatgcagagctgtgggtagatgacttcccacaatcactgcattcatatggcctttctccagtgtgaactctctggtgtgcaatgaggtggtccttcttgctaaaaactttctgacaatcctcacactcatatggcttttctccagtgtgaactctggtgtacaaggaggtgagacttcttgttaaataatttcccacatttctcacatttataaggcttttctccagtgtgaactctcttgtgtttagtgagactggagctttcagcaaaagattttccacattcactgcactcataaggcttttctccagtgtgaactcttttgtgttttgtgaaactggagctttcagcgaaagattttccacattcactgcactcataaggcttttctccagtgtgaattcgcttatgaacacagaatgtagagctgtgggtaaatgattttccacaatcattgcattcataaggcctttctccagtgtgaactctctgatgtgcaatgagttggtacttgtttctaaaaaatttctgacaagcttcacaagcatatggcttttctccattgtgaattctctggtgtacaaggaggtgagacttcttcttaaataattttccacattccctacatacataaggtctttctccagtatggccatgctggtgtagaatgaggttacccttgtgactaaaacatttcccacattccccacacttaaaaggtctttctgtagtgtgaactcgctgatgattcctaaggtgtcctttttcattaaaagatttcccacagtctccacacttgtaaggtctttctccagtgtgcatgcgctgatggtgaacaaggctgcgcttatgactaaaagatttcccacattctccacactcataaggcctctctccagtatgaacgcgctgatggctcctaaggtgcccgattgaactaaaagatttcccacattctccacacccataagatctttctctagggtgaactcgctgatgtagaatgagggtgcctttatgactaaaagatttcccacactctccacactcataaagtctgtccccagtgtgaatttgctgatggttcctaagatgtccttttgaactaaatgatttcccacattctccacactcataaggtcttgctccagtgtgaactcgctggtgtagaacgaggttgcccttttgactgaaagatttcccacattctccacactgataaggtctttctccactgtgaactcgctgatggtgaacaaggctgcgcttatgactgaaagatttcacacattctccacacttgaaaggtctttctccggcgtgaactcgttgatggctcctaagatgtccttctgaactaaaagatttcccacattcttcacacccataaggtttttctccagtgtgaaatcgctgatgttgaatgaggctgctcttttgactaaaggatttcccacattctccacattcataatgttttttgtcagtgtgaactctctgatgattactgaagctagcatatttgctaaacgatttcccacattctccacattcataaggtcttttcccagtgtgaactctctgatgattactgaagctaacatatttgctaaaggatttcccacattctccacattcataatgttttttttcagtgtgaactctctgatgattactgaagctagcatatttgctaaacgatttcccacattctccacattcataaggtcttttcccagtgtgaactctctgatgattactgaagctaacatatttgctaaaggatttcccacattctccacattcatgttttttttcagtgtgaactctctgatgattactgaagctaacatatttgctaaaggatttcccacattctccacattcatgttttttttcagtgtgaactctctgatgattactcaagctagcatatttgctaaaggacttcccacattcacagcacacataacactcttctctagtgagcagtctctggtgctgactgagtatatgtttggtgctaaaatgtttcatggattctccacagctgtagtgagctcccccacactgaatgggagacacacactcagttttgctgtttgacttctccccagtgtgactggcctcctgctggagtaatcctgacctgggcaaaaagtccttcccactctcactgaagacagatgactcccctgacacatgcaacttacacctctttgcaaacaacgcctcctcaacactccctctgtagggtttctctccaatgtgctcattctggtgctgatgaaagtttccactgtcatacaatttattcccccaggcctcacacctgtgcagtttctgcttgtgatgtgttccctgatgatctgccacatgcaaaatgtctcccaagatcgggccacacatctcacaggggtgggccttcttgggagacacacctgccataggagtcctgacctgagtctctctttgtatataaatactctgcttagaaggtgccgcctcatcttccactccacaccaacaacctgaaagcaagaaaatgctggtgaagtgcatgttaactctggtgggaaggcacagaccacccacaagtgtatctgaaaaactgaggaattactccaaggaactacttggaggaacaggatgttggcttcaggcggaagatggtgctatgtattattactggactataacggtcacagaatgtaggaggcctcataagttaaaggacacaaccatgtatgtaaaacagggagtacaggcagggtctacaatccctgcatctgcaaaccactcatctgcagaatttatgtcctcatgacatgtgagtgctgtagagagggatttgtccaggccaaggaaaacacaagcacaacacagcagctactcgaggagagtttaacaaagtatatatattcgctaacacaaatctctatgccaacactggagagaacactgtagatggtgacgtatgtaaatggatgagatctggggcccagagatatgaagattagataggagaatggacattagggtacaagttcatgtacaagtgggtcaaaagttaaaaaagaaagagtagaagcgataaggtagacaagtgtgatgctctcaagaatgaggaagaaaagacaaattatgtgtgcctacttgccttgccacaaaactactactaaaatagaacaggttgttggtatgctttcaataaagccctgactccatgacctcctccagggtgccgctttttttttttttttttttttttttttttttttttgagatggagtctcgctctgtcacccaggctggagtgcagtggtgcgatctgggctcaccgcaacctcccctcctgggttcaagcaattctctgcctcagcctcccgagtcactgggattacaggcatgtaccaccaggcctgactactttttgtattttagtagagacagggtttcaccatcttggccaggctggtcttgaactcctgacctcatgatccacctgccagggcctcccaaagtgctgggattacaggagtgagccaccatccccagcccagggtgccactctttagggactcactccttctgagcctattatgctgaggctgaattcatttgcatcttctggatcaaatggaggactgtgcctcccaccacaatgatgaccaaatacatgggacatgaatgatgcacagactaagggaaagacagaacaagggaacagccaacattgtctcagaacaactcagcccatgacagcccatgagagaaaaaaactgagtatttcaaggagaatttctaaagaaggtcttgcaagaacagcctctggtctatataggcagtgatgtagtctgtgaaggcaattcctgccacaggaaggcataagaaaatagcagctagagaaaggaagtagactgtgggtacacaggaacctgaaatctggacaaggacacccaaacatccacaggactaacaaggtgggcttctgactgggaatccctccctgggagcctgcagtaaagcaggtgttggggctgctccaagaaaggagtagggcagtatgtacacctcagacctaccaaccaagaacctacccacagaactgaagcaggaagctgtgtccatgctcctgacatgagaaagtcttaccaatggggaaagataggggaaaacagagactagctcaggtcacagggtgagtgtgagcaacttacccagggaggatataagtgccaggttctccagcgtcacatcacggtacaggcatctctgagcctcactaaggagattccattcctcccaggtaaagttcacagccacatcttcaaaagtcactgtgccctgttatgatgttgacagatgaaactacaaactgcccctatgctgaggtatcacaatccatctctcccacacatctactctcgcacatcctcctctcaaggtcctcaaacataggagaaactaggcccactggtcatggggtatagccaccaacaatagttgaacaaataggtatctgtgtggtggttgtgacgtaagagtccaccccctcctgacaggcactttccctagtatggccaaggtcatggaaagcccaatgtggcaccttcagcacagcagagataccctctctgaacacacctcattctttagacttccaggtacattccatgtccatccccaggtgactgccacacaccactggcctctctctggcctttaaacaacttaaagtatatttttttgtttgtttgtttgtttgagacagagtctcactctgtcaccaggctgaatgtagtggcatgatctcggctcactgcaacctccacctcctgggttcaagcaattatcctgcctcagcctcccgagcagctgggattacaggcatgtaccaccacacctggctaatttttgtatttttagtagtgataggatttcaccatgttggccaagctggtctcgaactcctgacctcgtaatcctcccacctcggcctcccaaagtgctaaaactacaggcatgaggcaccgcgcccagccagcttaaagtatcttaattccctcctttttcttcaactagtgtgggttgatatctacccctagggctataatgttggtaaaacaaattacatctgatattctacacatgtcatcaagagcaatctacaaatcaattgtattgagccaggcgcggtggctcacatttgtaatcccagtgatttcagaggccgagccaggtggattgcctgaggtccggagtttcagaccagcctggttaacaatgtgcaacttcggctctactaaaaatacaaaaaattagctgagcgtggtgtcgggcgcctgtgatcccagctacttgggaggctgaggcaggagaatcgcttgaacccaggaggcagaagttgcagtgagccgagattgcgccgttgcactctagcctgggcaacaagagcaaaactctgtctcaaaaaaaaaaaaaaaaaaaaaatcaaatatattaacagcctgataagagggacaccactcaccacagagagccacatgggggttgcattgtggataagagagagcaaccatggccatggcatgcaagctttgtaagatgaagagagtgtaatggcctgattccctcaggaggatgccattgacttatttgaataactctggacataaaaatggaattgaaactcactacaaactataacaggaactctgcctggtcccattgatcgaaaggcttcagaggctaggatacattacctttttttttttttttttgtgatggagtctcactctgtcaccaggctcgagtggggtggtgcaatctcggctcactgcaacctccgcctcctgggttcaagcaattctcctgcctcagctcctcagtagctgggattacaggcatgtaccaccatgcccagctaatttctatatttttaatagagatggcgtttcaccatattgggcaggctgctttcaaacccctgatgtcaaatgatccacccgcctcagcctactaaagtgccgggattacaggcgtgagccgctgcacctgttcagatatattacttaagagtgtgaagtggccagtcatggtgtctcacacctgtaatcccagcactctgggaggccaaagtgtaaggactgcttgattccaggagttcaagagcagcctggacaacacagcaaggtctttttctacatacatgcacacacacacacgcacacatacacatgcacacaagggaaaaaaatttaaaatatataaaaagagagttaaatgggaaagaaacttgcactcaggccatttgtggttataccaatatgaccaggcatccaggtggcaaatcacactgggccttaatttttggccttacactacatcgtagctgacaccatccagagtgtatggcccattcaaaccgatccaatattaccacagaactgcaattctattggatcctaaaaggagcggtggtctcaagtaattctgtgaggacctccttgcatggctccacagaaacacagaaccatgtgtggcttcagctatccatgaccctattccacttctgtgctacacttgccagcccctcagcaatgatgacctttccctcaattacttctgtacttctgcctgcatctcatctctattatctccatggaagtctgccccacgacaagctatgccctctgatacaccctacattcattgtcacttacctccctctcctgtgtgaatgcataacacaggttatgaatgccaataatgtccgccagggacccaggcaaaacatctagtcctcagcctccaaccagtcctttctggttccctaaaagatttactaccttattatgaagtgtgccctccaaaatgggacccatggctaacgcaccttagtccacacattagctatcatatactggatgtctccaatatcaattccttcccagatatcccgacctatgtggacaagcatctcagggtctgagcatggtgaaaacaaccctccttatattcccagtgactatattatgcctactcccaacttgctcatctcagctgatacagcttctatcactgctgctgctaaggccaaaaaccctagggttgccaggcacggtggctcgagtctgtaatcccagcactttggaaggctgaggtgggtggatcacctgaggtcaggagttcaagaccagcctgaccaatacggtgaaaaactctgtctctactaaaattacaaaaattagccgggcgtgatgccgtgtgcctcctgtggtcccagctactcaggaggctgaggcaggagaattgcttgaacctgggaggcagaggttgcagtgagcagagatcatgctactgcactccagcctggtgacagaacaagactccacctaaaaaaaaaaaaaagcaaaaacaaaaaacccccagcgtcatacctgaaaccctcttgcatgtccttaccgaccgcattagaaaatctagctgctcctttaccaaatgtaaatcacaattctagcgacatctccttggccaacaatcatccattaaacctcacctggatgacagaatgagcctcaacgctgtcttccttcctcctcccttaaccccatgttcctttctccaatgtggagccaggcagagaagtaacatcacctccccactctgatcagttttatctctgagcatttcacatactgctaccaaatccaaggctgaccttctaagtgtttacacagtttcactgaaatgggaatacctccataccacctgcgttatggacttagggcctagggtttagggtttctctagtgtttccggttgaaaggactgagctcgagaggtgcaacagagcaggatggcggaatagaaagctgcacccatcatacccttaacagaacaccttttttttttctttttttttttaagagagagtctcgctctgtcaccagggctggagtccagtagtgctaccttggctcactgcaacctctgcctccggggttcaagcaattctccctaattctccctgcctcagcctcccaagtagctgggattacaggcacctgccaccacactcgactaatttttgtatttttagtagagacacggttttgccatgttggccaggctggtctcaaattcctgacttcagttgatccgcctgcctcagcctcccaaagtgctgggattacaggcgtgagccaccacacccggcccagaacaccaaatttaaacactgtcaacacagaaaaaaatcacctttgtaagaaccaaaaatcaaatgagcactcacagtacctggatttaattttgtattactggaaatggcactaaaaggggctgtagagtcttgagttgccaatgccactcctccccatcccccagcagtgcctgcctgttgtggagaatctgtgctcctgggaagggaaagcgcagtgactgtcagacgttgcacagaactcagtgcttccctgtcatagcagaaagcaaaactgggctgaactcaacggacgcctacccagggagtaagcatagcgaccagcccagccagaggggaatcgcccaccccaatggtcaggacttgagatctggcaagccttgccactgtgggctggagggctctgaagtcctaaataaacttgaaaggcggtcgaggccacaaggactgcaacccctaggcatgtcctgtgctgagctgggctccgagccaggggacctggttgggttgggggagcacaacctactgagacaccagttgaggtagctaagggtgtgcttgtgccacccctcatgcaaccccaggctacgtggctccttccttccactcgaggagaggagagggaacagcaaaaagaactttgtcttgcattttggatgtcacctcagccacaggatagggcactgggcagggttgtgaggacccattccaggcccacccagataatatttctagacacactctggaccaaaacagaacctgctgccttgaagggaagaattcagtcatgggaggacccatcaccttctgactaaacaacccttggaccctgaataactagcagcagtacccaggtagtatgcgatggcactgggtgagactctgagacatgccagcttcagatgtaacacagcacactgctagctgtggtggttacggtcagagaccccacctgcttgagaataacagaggaaaaagtaaaggggaccttgtcttgcacctcagctgccagctcaaccacagagggatagagcaccaagaagcctcttggggtccctgattccaggccttggctcgtggatgacattgctggacctgccctgggtgagtcttgaagagtcagcctcagaccaggcaacattcaccacaagctgactgaagagctcttagcccttaatggaacctcagtggtagtctgacagcactccctgtgggcccgtgctggtggtggccacagagtgaggctgctctgcctgtggaaaggggatggaagagtgggaagggctctagcttgtagtttgagtgccagctcagctgcagtgcaaaggaacaccaggtagatttctaaggatttttactccaatccctggctcatggatggcatctgtataccaacctgaggcctggggaactcaccgtcctaaggagaaggacataagcctgtctggctttgccacctgctgactgtaccgggctagggccttgagggaacacaggcgatagccatgtagtggtcacaggagccttgggtgaaacccagtgctgtgctggcttcagctctcacccagcacagtcccagtggtggtagctaaaggggtgcttctgtcccaacccccagtttcaggcacttcagcactgacagagacatgctgggacaaagtgagggaagacccaacaagagtctctacctgttatgttaatcaagggaaatatttcagatcttattcaagaccacaaaggtggtatagctctctgagtctgcaagagtcacagcattactgagtgtggggttcccgctgaagtagattcagcttagatcacaacacccgggtcctttcaaatacctggaaactcttcctaagaaggacaggtacaaatgagcccagactgtgaagaccacaataaacacctaactgtttaatgcccagacactgatgaacatctacaagcatcaacaccatccaggaaaacgtgacctcaccaaacaaactaaataaagcaccaaagacgaatcctggagaaacagagatacatgacctttcagacagataattcaagatagctattttgaggaatttctcaagacaaacacggagaaagaattcagaattctatcagataaatttggcaaagaaattaaaataattaaacagaactggccgggtgtggtggctcacacctgtaatcccagcactttgggaggccgaggcgggcagatcacaaattcaggagatcgagaccatcctggctaatggggtgaaaccccatctgtactaaaaatacaaaaaattagccaggtgaggtggcgggcacctgtagtcccagctacacgggaggctgaggcaggagaatggcatgaaccccaggggggcagagcctacagtgagctgagatcacgccactgcactctagcctgggcgacagcgagactccatctcaaaaaaaaaaaaaaaatagaactggccaggcatgatggctcatgcctgtaatcccagcactttgggaggccaaggcggatggatcatgaggtcaagagatcgagactattctggccaatatagtggaaccccgtttctactaaaaatacaaaaattagccggatgtggtagtgcacacctgtagtcccacctactcgggaggctgaggcaggagaatcgcttgaacctgggaggcggaggctgcactgagctgagatcgcaccactgcactgcagcctgggtgacagagagagaccctgtctcaaaaaaaaaaaaaaaatcaaaatggattaaaaaagacttaaatctaaaacctaaaactatgaaactactaccaaaaaagactgaagtgggcaaagatttctttatttttttttttgagatgaagtctcactctgttgcccaggctggagcgcaatggcacaatctcggctcactgcaacctccacctcccaggttcaagtgattctcctgcctcagcttccgagtagctgtgattacaggcatgtaccaccacacccagctaatttttgtatttttagtagagatggggtttccccatgttgcccaggctggtctcaaactcctgacctcaggtgatctgcccgccttggcctcccaaagtgctgggattataggcgtgagtcaccgagcctggccgacaaagacttcttgagtaatacctttcaagcacaggcaaccaaagcaaaattggactaatggcatcagatcaagttaaaaagcttctgtacagcaaagaaaacaatcaacaaagtgaagagataacccacagaatgggagaaaatatctgcaaactacccatctgcaaagggattaattaccagaatatatagagttcaaacaactctataggaaaaacccttaataatcccatttaaaaatctcaatagacatttctcaaaagaagacatacagtcaggagcagtgcctcccagctataatcatagcagtttgggagactgaggcagaaagaccacttgagcctaggagtttataaccaccctgtttaaccagtgagacccccatctctacaaaaaagtttaaaagctagccaaggcaaggtggcacatgcctgtggtggtccctgccacttgggagactgaggtagcaggatagcctgagcccaggtggtcgaagctgcagtgagccatcatcacactacagcattccagcctgggtgacagagcaagatcctgtctcaaaaatacaaacaaaagacaatgacatacaaatggcaaacaggtataggaaaaggtgctcaacatcactggtcataagagaatgcacatcatctcaccccattaaaatggcttatttatatccaaaagacaggcaataacaaatgctggtgaggatgtgaagaaaaaggacctctcgtacactgttggtgggaatggaaattagtacaaccactatggagaacagtttgggggttccttaaaaaactaaacattaagctagcatataatccagcaatcccactgctgggtataaaccaaaaggaatccagtatatcacagagatatctgcactcccatgtttgctgcagcactgttcacagcagctaagacttggaagtgacctaagtggtcatcaacagataaatggataaagaaaatgtaggccggacgcagtggctcacacctgtaatcccagcactttgggaggacgaggccggtggatcaggaggtcaggagatggagaccatcctggctaacacagtgaaatcccaatctctactaaaaatacaaaaaattacccaggtgtggtggcacacgtgtttagtctcagctacttgggaggctgagacatgagaatcgcttgaacccaggaggcggaggttgcagtgagccatgatcgcaccactgcactccagcctgggcaacagagaaggactccgtctcaaaaaaaaaaaaagaaaagaaaatgtgagggcgcggtggtggctcacacctgtaatctcagcacttcgggaggctgaggtgggtggatcatgaggtcaggagttcaaaaccagcctggccaagatggtgaaaccccatctctactataaactacaaaaattagccagccgcaatggcaggcacatgtaatcccagctactccagaggctgaggcaggagaatcgcgtgaatctgggcagcagaggttgcagtgagccgagattgcaccactgcactacagcctggacaacagagtaagactgtgtctcaaaaaaaaaaaaaacaaaaaacaaagaataagatctagaaaaagagaataagatctagaaaaagagaataagacctagaaaaagagaataagatctagtatttagtagcacaacagggtgactacagtaaaaacaacctaattgtacatttttaaataacaaaaagagtataattggattgtttgaaacacaaaggataatgcttgaggtgacggatacattaaccctagtatgattattacccactgcttgcctgtatcaaaatatctcctgtaggcggaggttgtggtgagctgtgatcacgccactgcactccagtctggatgacagagtgagactccttctcaaaaaaaaaaaaacaaaaaaacaaaataactcctgtaactcataaatacatacacctattatatacccacaaaaatttaaaatttaaaaaagaaaatatttttaaaaataaaaaataaagagtcccacaacaccacaagctagagaacatataggtcggggtcagtaccagtgagggaatggaacactctccacttccttatctgagttcctaaaatgcttctaagtgcttggaggagaggcagacattacaggaatgtgtccctgataggatgtgataagctcagacctccaggtacccctccttggccctggagtcaggtgacctcagactgcttgtctgacctgcatgcctcaatgtaaaatgtcatctctgccacctatgtgatctacaacaaagattcaacctcccagggccccacggtgctcatcacttctctccactctgttcttcctttgattggccttcggaaaacctttaaaatccagattttgatcctgtcctttgtatagagcacacttgacataactaactccatcttagaaaaagacaatttgtatttcacagggcactctgccatcaagggtaagatgctttgtttaataaacaaaaaaaaaagacggccaggcacggtggttcacgcctataatcccagcactttcggaggccgaggcgagcggattgcctgagcttgggagttcaaaagcagcctaggcaacatggcgaaaccccatctctactaaaaatacaaaaaattagccaggtgtggtggcgggtgcctgtaatcccagctactcgggaggctgaaacaagagaatctcttgaacccgggaggcggaggttgcagtgagctgagatcacaccactgcactccaggctgggtgacagactgagacgctgtctcagtaaaataaataaataaataaaataggctgagtgtggtggcttatgcctgtaatcctagcaagttgggaggctgaggcgggcggatcagttgaagtcgggagtttgagaccagcctgaccaacatggagaaaccccgtctctactaaacatacaaaaaattagccgggtgtggtggcgcatgcctgtaatcccagctactgggaggctgaggcaggagaatcgcttgaacccgggaggcagagattgcagtgagccgagatcacaccattgtactcctgcctgggcaacaagagcgaaactccgtctcaagaaaacaaaacaaaataaaaaataaagactacatctaaccaggtaaggtcacaaacaaggaaactcttccactatcagttctcaccagagtattctgtaactgtaaaagattaggccttcagcagctcaaaactcagcatctgctgcctaaggctctgccacctcaaagactcttccttgtaagactgcaggccaattgcccaccaactggcccagaccaagatgccttttgtcttccttgctccctctaaactggttccataacgtttgctcctatatctttttcctcttgatgctaagcattattttgttccttgtgttgtaatgcccaaccttgttttcactaatcctgtttttagactctcccttttgctctcttaatcacctagcctcgtttccacatgaatagactctcgcttagctgagaaagccagacgagctccacctggcccccttgatttacaagacattaaggactccttacccacccccctttcctcaaggagttaacttgtgtaagcagattctcaacatatcaaaggagtccaattaactgataagggactgggaacaaaccatgtatgaagttcccaggattttgctcaaaagataacaccataaagccttgagtttgtgtctggcgtagtgcccatatctaactcttatgaaggatttagagcgccacacctggtaccttgcctttttgtaaccatttgtcttttaaattgtttgtttctctgtaaccatttatccttttaattttttgcatgtttttacttctgaagagttgttgcatttaagctcccctccccttcctaaaccaaagtataaaagttaatcaagccccttcctcggggccgagagaattttgagcgttagccgtctctttggccgccagctgaataaaggactcttaattcgtctcaaagtgtggcgtttttctaactcgcccgggtacaacagtgttatgtttaacctttaacatttacatgttaagtatactattgtgtattgtttgctatattgactgacttggggagtgtcttcagcctctgtgcccatggccaactaccaagtgaactggaatcacaagagaattgcctccttcgaactccatttagctcatggcttttgttgactcaaatatcacctgacactgtgcaaagacacaaacatgcatggacctgattatctctacccttacaatgctcatgacatccctcctttcttcgaaaatctccatgccttctagggtcctcacgtgagttcatagcccccagcctgcttgctcttccaggaggagctccgcctcataatttgctcccaacaggcacctgtggaccccagattccatccttctggctcagttcacttccaggcctttgcccgcgccagtccctgtacctgccggtctccccaccgcatcccacgggtgtcagaaatggggcccctcccgcaagcgcctcagtgtcccaacgccggcgtccgggctgcagagccgtgaacaggcgctgctacctcgctgcttttgggtgacgatgaggtgacctgaggacacagaaggccccacaattacctgagcggagagcctcagcgtagccgcggcagccatcgaaccacgtggttttaagcagagtcgggaggatagggcgaccagccaggagatatgggcacgacggtccgtatcctggcccaggagtgggtcacgctgggcgccgtcacagagctccagagtagcctctgtgcagcggaggacaactgctccccgacttctgggttcagtcaccacagtgcggacctagcgctcaggagcctctcctacaaataaatccaacaccaatcaaaatggccgccaccagagggcgccggaagtccggacccattgtcacgtgcacacaggaaacgcctttattctgagccctcagaggtcttctacgctatcattcgaggctgagttttctgggtaatgtagttccctaggcaacaaggagggtaaagggcgcaattcccagaggcgcttctgcaggaaaagcccagcttcacctcgggagtatccttaagatgtgcgtcctgactggtatggtggctcccgcctgtaattccaccagtttgggaggccaagtcacaaggatcatttgaggtcaggagttagaaattagcctgagcaacaaagcaaaatcctgtctctacaaaaaataaaaaatattagcggagtgtggtcgggcgggcctgtggtcccagctgccctaaggttggggttagggttagggagcctgaggagggagaatcgcttgagctcaggagttcgaagctgctgtaagccgagatcgtaccactgcattccagcctgggcaacagaacgagacctcttatctaaaaaataaaaataagggccaggtgcgggcggctcacgcccgtaatcccagcactttgggaggccgaggcaggtggaacacctgaggtcaggagttcaagactggcctggccaacatggtgaaaccccgcctctactaaaaatacaaaaattaacccacatggtgacatgcgcctgtaatcccagctactggggaggccgaggcaggagaatctcttgtacatgggagtcagaggttgcggtgagtgagatcctgccactgcactccagcctgggtgacacagcaagactccatgttggaaaaaaaaataaaaataaaaataaaaaaataaataaaagattgcagatctttctcctaggcagaggatcatcctgcctctccttagaactcacattgagatttcttggggttattggctgtaactgattaccctagtgtatggaaaaatattatttcagagttagtgtagatgttcccaaaggctacagatccaaattcacctatcatttcagatggtccttcagatgcaaaattcttccactggaagcaaagattaatgcaaagattaataaccattattgtattgttaaaatgaacgtgtaaacacccagagggttcatttttcctactgcccagataaagccaatttatcaggacagggaaattgcaaaagaaaaagagttttattcacacagagttggatgaacagcatactggagtcttactagtattactcaaatcagtctccctgaaaattgcgagactggggttttttgttgttgttgttgtttatttgtttgtttgttttctgagacagaattttgctcctgttgcccaggctgaagtgcaatgtcacgatctcagctcactgcaacctccgcctcctgagactggggttttttaaggataatttggtagatagggggccatgaattggggaatgctgattggttgggttggagatgaaatcatagggagtcaaagttgttctcttgtgctgagtgggttctgggggagagggaggcacaagaccagataagccagtttacccatctgagtggtgccatcagatccatcaagttcagggtctgaaaaatatctccagcaccaatcttagcttttgcaatggtgataccatccctaggaacaactggggatgtttacagtcttgtggcccctggctgcatgactcctaaatgataatttctaatctatggggccctaataaatcagtaagttaacaggaattgggaaggagccaagctggcagaacaagaacctaaccccatctgcaacctctttgtgggaagaaaccacagctgtcagaagtgtttaacagagcaactccgtcttgaataggggttggataaaatgaggctgagctgcattcccagacagtgaagacattctaagtcacaggatgagataggaggtcagcacaagatacaggccataaagacgttgctgataaaacagtttgcagtaaagaagccggctaaaacccaccaaaaccaagatggccatgagagtgacctctggtcgtcctcactgcaacactcccatcagtgccatgacagtttacaaatgccatggcaacatcaggaagttatcctatatggtctaaaaaaaggaggcatgaataatccaccctttgtttaggatataatcaagaaataggggccaggcgcggtggctcacgcctgtaatcccagcactttgggaggctgaggtgggtggatcacaaggtcaggagatcgagaccatcctggctaacacggtgaaatcctgtctctactaaaaatacaaaaaattagctgggcgtggtggcgggtgcctgtagtcccagctacttgggaggctgaggtaggggaacggcgtgaacccgggaggtggagcttgcagtgagccgagattgcaccactgcactccagcctgggtgacagagtgagactccgcctcaaaaaaaaaaaaaaatcaagaaataaccataaaaatgggcagccatgccaggcatggtggctcacccctggaatcccagcactttgggagaccaaggtgggaggatcatgagatcaggagatggagaccatcctggctaacaacagggtgaaacccaatctctactaaaaatacgaaaaaattagccgggcggctctgtctatggagtacccactcttttattcctttactttcttttcttttttttgagcaggagttttgctctgtcacccaggctggagtgcagtggcatgatctcagctcactgcaacctccacctcctgggttcgagcaattcttctgcctcagcatcctgagtacctgggactacaggtgcgcaccactatgcccggctaacttttgtatttttagtataaacacggtttcactatgttggccaggctggtttcaagctcccaaccttgtgatctgcccacctcagcctcccaaagtgttgggattacaggcgtgagccactgcacccggcccagaccaatgtatttctttaatgtatttgattgatgtctcttgcctccttaaaatgtataaaaccaagctgcgccctgaccaccctgggcacatgttctcaggacctcttgagggctgtgtcacaggccatggtcactcatatttggctcagaataaatctcttcacatagtctacagagtttgactcttttcattgacactgaagaaacccccaacccagaggaaaatcatctgtgtgcaccacttggctcactttgagtgagtggggtgcatatacccagataaagaatgagattggtttacaggcccaacttggtggagttagagtctctcctggttaaaggctcctctcaataaaaggcaaggacacttgaccaaactttggttcaatgcccaaattaggaagattagattacttcctaagagttagggggttagaggcccctctcagtaaagtccctcttggctaggaatgggtttggcacaatgggctgttaactgctgttctctttggaataatctgccttgctgatggctatgggtgacaggactaggaatgtacaggatcatgggacatggggagctttttcctccccaaaagggaaaacttgcgagctgatgggactgctggaaaagatccccttgctactgacaagcagccacctgaacttttcagtgtcactgcaatgggagtggggggggcttctctggcctctctaagctcctggccttccccaccctgccacaggcaatgtttttctctgtctcctttccctttcttatcttttctgttattcagggtgaccatcttgcccagagaccaagttgaaactcatggtcggaggttggattaaagatgatggggcccaaccagggcaagtttgagccttgcctgttagatattccaggcggagccgagtggctaatgtgtatgttttgtcacacgtattttgctctggccagaatggaaaaagataatttagctttgtattgcagattggcccccaagggtgtggtgcagccagctgggtcactagaggctctcagggaaaggcaaaccagaagcctggaatgctggaatgccagcaaaagggtaagaatttcttttttgttattgattttttttttttttttttttggagacggagtcttgcactgtcgcccaggctggagtgcagtggtgtgatttcggctcactgcaacctccgcctcctgggttcaaacgattctcttgcctcagcctcctgagtaggtgggattacaggcacgcaccaccatgcctagttaatttttgtatttttactacagacaaggtttcaccatgttggccaggctggtctccaactcttgacttcaggtgatctgcccgcctgggccccccaaagtgctggaattacaggcatgagccactgcacccagcaagaatttcctaccagtcagttggctgggtgtggtggctcacacctgtaatcccagcactttgggaggcagaggcaggtggatcacctgaggtcaggagttcgacaacagcctgaccaacatggtgaaacaacatctctactaaaaatacaaaaaattagtcatggccgggtgcgggggctcatgcctgtaatcccagctctttgggaggccgaggtgggcagatcacttgaggccaggagttcgagaccaacctggccaacatggtaaaaccccgtctctactaaaaattgaaaaaataagccgggtgtggtggtgcatgcatgtaatcccagctactcgggaggctgaggcaggagaatcacttaaacctgggaggtggagattgtagtgagctgagattgcaccattgcactccagcgtgggtggcagagagagaccccatctcaaaaaaaaaaaaaaattagtcgtgcatgttggtgtgcacctgtaatcccagcttctcgggaggctgaggcaggaaatcacttgaacccaggaggtggaggttacagtgagctgagatggtgccactgcactccagcctgggtgacagagcgagactctgtctcgaaaaaaaaaaaagtccaggtgcagtggctcatgcctgtaaccccagcactttgggctgaagtgaggggatcacgaggttaagagctcaagactatcctggccagcatggtgaaaccccgtctctactaaaaatacaaaaattagctggacatggtggctgtagtcccagctgctcaggaggctgaggctggagaattgcttgaacccaggaggtgggggttgcagggagctgagatcatgccactgcactccagcctggcaacagagtgagactccatctcaaaaaaaaaaaaaagaagccgatttgcccaaatcaaagaaagaaaagaagtgggttttcttattttgtttcattttgtttttagtctgtaaatgaaacaaaacagcaaggagaaaagtcccctgatttgtatcctagtgcttcttgatcacacctagttggcatagctgcaaaaagcatagccggctgggtgcagtggctcacacctgtaatcccagcactttgggaggctgagacgggcagatcacgaggtcaggagatccagaccatcctggctaacacggtgaaaccccgtctctactaaaaatacaaaaaaaaaaattagccgggcgtggtggcgggtgcctgtagtcccagctacttgggaggctgaggcaggagaatggcatgaacctgggaggtggagcttgcagtgagccgagattgcaccactgcactctagcctgggcaacagagcgagactccgtctcagaaaaaaaaaaaaaaaatcatagccacatctatctaatcttattgctcatagctgttaaataccaaacctgaatacgcaattttagaaacggagccttcaatgctttttgttcccaatgtttcacaagcaaatggatggaaatcagaaggcacacaggggaagagtataataaaagccctaagacaagttaaatgaagtcccctgaaaatgacagtgaagcagagcaaccaagagattgattcatacagcaaagaggacaagacagattaatgcaaagttgacatcctgtggtgccaaaccagttcttagccaagagggactttactgagaggggcctctaactcttaggaaggactaaatcttaggaaggactctaaccttcctaaattgggcctcaaacccagggtcagtcaagcctccttgccttttcttttcttttctttcttttttttttttttgagatgaagtctcactctgttgcccaggctggagtgcagtggtgcgatctcggctcactgcaacctctgcctcctgggttgaagcaattctcttgcctcagcctccctagtagctgggattacaggtgtgtgccaccacacctggctgatttgtgtatttttagtagagatgggttttcaccatgttggccaggctggtctcgaactcctggtctcaggcaatccgcccgcctcggcctcccaaagtgctgaaattacaggtgtgagtcaccgcacctggccacgtccttgccttttattgagaggaaactttaaccctctctgtcttaggagagactctaactccctaagctgggcctctaacccaatctcatcctttacccaggtgccccaccacttacccaaagtcggccaattagtgctgcagcctatttcctttgggccggtgggtttcttcagtatcatcccttcaaggttcaccagaaagatgttaccagaaagggcgtcccaattcagaccccaagagagggttctttggatctcacacaagaaagaattcagggtgagtccacagtgcaaagaaaagtaaatttgttaagagagtaaagtgatgacagaatagccactccatagacagagcaggctcttcccgaaagtcagaggaggaatgcgtccaccctaggtacttgtttatacatagtgtcaggaataacgctcaaaattttaaggaaattgaacactcgaacaaacgatttttagcaaagaaattttacgtttgcacagaggggtgcctctttggccagtcgccatgagagcgcacctgaaaaaaggggcacgagagcctttgagcgagccacttttgtgagcgagactccatctcaaaaaaaaaaaaaaaaaaagaattggcagagattttaaaaaggcttataaagaaggagccaaaattccagtttctgattggttggtgtgggcattgataaaggctgctcttgagccatttcaaacagatcacgagacagattcagatgaggaagacaagtgtgtaaaaaactaacttcagattctgaatgcgaggagcaaaaaccagaggaaattaagaaagggaaactgaaaagggtatgttttactaacccatcagctccacctgctgaattaagtgaatggccacctcctttccctccccataatgggcgagaaaatgaattagctgtaaaatttactgctcctgtagttgcaacattaaaatctggagcaattggtggtgctatacaaaattctattcaaaaggctagagctgagggagaccttgaagcatggcaatttcctgttactatcacccagcaaggagggaaaaatatagctagttgggccacattttcttttaagctattaatggaatttaagcaagccattagtcaatatgggccaaattctccttttgtacaaactttactaaaaaatgtggctctgaataatagattgataaaatatgactgggatactttaacaaaatctgttctcactctatctcagtacttacagtttaaaacccggtgggctgatgaagctcaaactcaggcaagggaaaaaacacaagcacagccatctgtgcctgtttcctttcaacagttaaagggagtcagtcctaattggggtcaattagaaaatcaagcagtaatggagaatgttgccattgttcagttatgcactgtgtgcttacgggcatgtgacagaataaatgttacaggagaaaaatatccttttttcagttctgtctgacaaggacctaaagaaccatatactgattttattgctcagctccaggaggctgtgaataaggccataactgacaaaacagctcaagatgttgtaatacagcttcttacatatgaaaatgctaatacagagtgtcaaaatgctattagacctatgagagggaaggctcatttggctgaatatattaaggctggtgatggcattgggggtaacttacacaaggctactcttttagctcaagctatggctggattaaaggtgggaaaaatacgccccatttttcaggctcttgctttaattgtgggcaatttggacacacaaaaaaggaatgtagaaaaggaaatcaaaaggcaaaactattaccatcaatcaacagaaaagtcccgatgtatacccccggtataagaaaggcaatccctggacaagacagtgtcattctaaatttagtaaagatggacaacctcttttgggaaaagggaagaggggcacacctcaggcccctcaacaaaccaaggcatatccgcacagtcagtgcccttacaaacgtacaacaattgtcccccgccacagcaggcagtgctgccatgtatctctgcagcacaattcccactccctacttcctggggagccaccaaagaaggtccccatgggtgttaggggccctttaccctcagaaaaagttggtctattgcttggagggtctagcttaaatttaaaaggtgtcactgtacatagaggaataattgattctaattatgccagagagattcaactagttgttagttcctcaactctgtggtctgtttccccaggaaaaagaattgctcagttgttgctgttaccttatacaaaactgggaaacagcactgtaaaaagaacaggaggctttggtagtactaactcagcagggaaagctgtatatttggttaattgaatgtctgataagagacctatttgtacagtaaccatccaaggaaaggactttgaagggttagtagatactggagctgatgtttctattattgctttaaatcaatggccctgacactggcccaaacaaaaggcatccattggtattgttggagtaggagctgcttcagaagtttttcaaagttccttaattttgccatgtctagggctggatggccaagaagggacgattcaacctattattacagctattcctgtcaatttatggggaaggggcatattgcaacaatggggtgctgaaatatctattcctatggatcagtatagtaataacagtaaacaaatgatgagaaaagtgggatatctcccaggaaaaggattaggaaagaatgaaagtgaccaaccagaacctttagaactaaaagggcgaacagatcgaaccgcattagggtatcatttttaggagcggctattgctgagcctccagctcccattcctcttgtttggttaactgccaaaccagtttgggtggagcaatggccgctgaaacaggaaaaaactggaggctttaaaagaattagtacaggaacaattgcaaaagggacacatagagcctactttctctccttggaattctcctgtttgttattaagaaaaaaatcagacggacgcggtggctcacgcctgtaatcccagaacttgggaggccgaggcgggtggatggcaaggtcaagagattgagactatcctggctaacacagtgaaaccctgtctctactaaaaatacaaacattagccgggtgtggcggcatgtgcctgtagtcccagctgctggggaggctgaggcaggagaatggctgaaccagggaggcggagcttacagtgagctgagatcgtgccactgcactccagcctgggtgacagggccagactctgtctcaaaaaaaaaaaaaaaaaagaaaagaaaaaatcaggtaactggagaatgttaacagatttaagggctgttaatgctgtaattcaacccatgggctcactgcaaccagggctgccctctccaacaatgattccaaaatactggcctctaatattgcttatttaccattcctttagctacccaagattatgaaaaatttgcttttactgttcccgctataaataacaaagaatcagcggataccattggaaagtactcccacaaggcatgttaagtagtccaactatttgtcaaacttatgttggaaaagctattaagccagttagagaacaatttaaaaaatgttatattatcaattacatggatgatattttatgtgcagctgacactagggaggaattaacactatgccacaaacagaaaagtctgtaactgctgcaggactaatcatagccccccataaaatccaaacttctactccctttcaatatttaggaatgaaggtagaacaaagtgctactaagtctcgaaaggttcaaattcaaagagataatttaaaaactttaaatgactttcaaaaattattaggagacattaattggatttgtccaactttaggcattcctacctatgctatgtctcaccttttttctgccttacaaggtgattctaacttaaacagtaaatgctccctgtccaaagaggcattaggggaacttcaattacttgaagaaaaaattcaacaagcacaagtgaaacgaattaaccctatgcagccattacagtttttagtttttcctactaaacattcacctacaggagttattgttcaacagaatgatctggtgaagtggctttttctacctcacaatacaaccaaaacgcttactctgtattcagatcaaattgctgtactaataggacaagcaaggctgcacacaacaaagttaatgggatatgatccaaatcaaattacagttccagtaaacaaacaacaaattcagcaaacttacattaattcccaggaatggcaagttaatttggcaggttttgttggcattcttgataatcattatcctaaatctaagatatttccatttctaaaattaacatcctggatattgccttctattactcaaaaagcccctaatgaaggggccattactgtttttactgatgggtctagtaatggataagcctcatttgtgggacctcaacaacaagtttttcaaactgactttgcttctgctcaaagggctgaacttattgctgtaattacagtactgaaaactttaaaaaagccagttaatattgtttctgattcagcttatgtggtgcaaatcacacaaaatattgatgaacaacttaatcttttatttcattctttacaacaagcagtacaacaaagacattcccctttctatattactcatatgagagcacatactaacctccctggtccttttaacttaatcaaagggcggatgcactggtttctgcagcttttgccgatgcacaaacgttccattccttaacccatcttaatgctgcaggcctcagaaaaagatacggcttatcctggaagcaggttaaggagattgtaaaacacttttctgccggtgaagtcctgcatctgccacatcagggagcaggagttaaccctagaggtctatctccaaattccatctgtcagatggacataacacacattcccacttttggaaaattgtcctttgttcatgtttcagtagatatttattcacattttatctgggccacatatcaaacaggggaagctacagctcatgttaaaaaaccttttttttgctttgcagttatgggaatcccagaaaaaaccaaaaccgataatggcccagagtattgcagcaaagccatggctgcattttttttttttttttttttttttttgagacggagtcttgctctgtcgcccaggctggagtgcagtgaccaatctcggttcactgcaagctccgcctcccgggttcacgccattctcctgcctcagcctcccgagtagctgggactacaggcacccgccgctgcgcccggctaattttttttgtatttttagtagagacggggtttcaccgtggtcttgatctcctgacctcgtgatccgcccgccttggcctcccaaagtgctgggattacaggcgtgagccaccgcgcccagcagccatggctgcattttaacagcagtgaaatattactcatactacaagtattccatataactcacagggacaagagatagttgaaagagctcattgttaacttaaaaactcagttacaaaaacagaaagagggagaccaggtatataaaaccctacatatacaattacacctcgctttattaacattaaattttttaaatttacaaaaggatcagcccatgacagcagctgaacaacacttaacaggacaaaaggaaaataaaaatgccagacaagatatacagtggagggatgcacatacaaagagttgggaaaaaggaaaaataattacatggggaagaggatttgcttctgtctctccaagtgacaatcaggtgcctctgtgggtgcccaccaaacatctgaaggtctatcatgagccacaccaggaagagaggactctgggaagagccagaactccctatacgagtgatggcatgaatgaaaatctcagagacaaaggaaaagaccaagaatactcaccaggcagaccctccaacatggggacaaatcaggaaactggcacagatgcagaggacaatctgagagcacagaacaaatcaaaaacaactagtaacctaatggtggctatgatggtggtacttactgtggcggtaagcctccctactgtaaaagcaactcaaaattttacttattggacttatgtcccatttcctcctttaattaggtctgtgagttggatggaccctattattgaggtgtacaacaatgacagaacctcgatgcctgagcccatagataacagagtgccgatgcatcctaatgaggaagggatgaaaatgaatatatcaataggatataaatatcctccaatatgcctaggacctgctgctggatgcttacaaattggcacacaagtatggttggcagtaatccctggaaaaaataaatcacaggctactttatatatgatttcagggcaaagtttaaaatataaccattccagccctgaaactcagcagttctgaccagacaaactcgaatgtaaacaaaatagagtttggtttgaaggtgtggacgcttggcattggggaaattgtgtagcaagtaaggctggggtgctacaaaataattcctatggaatcgtcattgactggtcccctaaggggatttttaagaaaaattgcactgaagggccttcttataaaataagctgatggactcattggaaagagaaccatacacggtacattcagacggaagctgatgttcctattatatggagccctggtggcattatcacccctattccaaaaatgatatctcctgccataggacaggaacattcaggattatggaaattagctatggctcaaagttcaatcacaatttgggagggtaaatataataagtataaaggggagggaggtaaatataaatatgttctctcttttctttctaacaggaccttttggaatcaaaattgtgtccgaccaccttttacgttagcagtaggaaatattactcttctttttttttttttgagaccggagtctcgctctgtcccccaggctggagtgcagtggtgtgatctaggcccactgcacgctctgcctccctggttcatgcctttctcctgcctcagcctcccgagtagctgggactacaggcgcccaccaccatgcccggctaattttttgtggctttttatttatttattttttttagtagagacggagtttcaccgtgttagccaggatggtcttgatcttctggcctcatgatccgcccgccgcagcctcccaaagtgctgggattacaggtgtgagccaccccgccaggccggaaatattactctttacataaatacccgttttatcacctgccaggaatgtcacttgtttacttgcattaacgacatcttgataaaaatcaaactatcttgttaattagagccagagaaggagtttggatccctgtgtctctaaatagaccatgggaggcatcaccgtccattcacattataactgagatccttacaaaactcttatcccgttcaaaaagatttatagttgctcttatatttgctataattggcctcactgcagttaccaccactgctgcagtagctagtgtggctttacactcatctgtgcaaactgtcaaatttgttgataaatggaaaaagaattctatgaaattatggagctctcaggcccaaacagatcaaaatatagttagtcaaattaatgatctccctcagacagtaatttggatgggggattgcatcataagtttagaaactagaattcaaatgcaatgtgactggaatacatccgatttttgcgttactcctcatagttagaatgaaacagaacaccaatgggaaattaaatgccatctagtgggcagagaggaaaatctcacccttgatattgtaaaagtaaaagagcaggtttttgaagcctctcaggctcacttaaccctgctccctggaactgatattttcagcgaggcagccaatgggttgtctgcaatcaattctcttaaatggattaagaccactggaaactctacacttgtaaattttgttctaataattatgtgcttgtgctgtctccttttaatctacagatgcggaagccgcttctggagagaaagccgctgccaagaacaagcaatgatagctgtggcggttttgcaggacaaaaaagggagacatgttggcagaagagctgaggcagggctcgtttttctgacataatgtaaaagagtcttggaacatgtcctgggtccagggtctaaaacccctcatgacctttggaacaccaaactctgtgccaaagggtggaaggctgccctgccgcagtacaatctaaacccagggtatgaaaccccttgtggcttggagagaacccagggctcagggcataaaaccctctgtagcctttggagtgtgtccagactcactggccccttgcactttgttctcccaagatcataaattgattgtatcttgaattagaagaacctattctcccttatctcaagtagcagagcatatgctaagccatcacagctacgcttgatgcaccgctttctacccccacatcctcacctgtctgcccccacatccgcacgtcctctccacctgcttctttgtttgattaccaataaatagtgtgggctcctagagctcagggcctttgcagcctccatactggcgttggcccctgagacccaccctatgtactcttgtcttgtctcattcctttgactctgccagacttcatagccccagtgaccaggtgttgggtctgatcaccccaacactttgcctccaccggtcccatgccaccctcgctttaagcccctgcctttgaaagcaggtcatgttcactgagatgctggacactgcaggtatctgtccctgggacagcagggacctctgaagcttctttgtggcctggtttatacttttttccatcttgtggtttttctaatggactttcacggattttgtaatctcgtaactttccaagctccatcacttcctaaatcttaagaactgtaattgacagtttaaattgaaggtgctgtttgtagacttaatacccaatgaaagcccaggcatcgccgggagtggtggcccacgcctgtaatcccagcactttgggaggccaaggcgggcggatcacctgaggtcgagcgttcctgactagcttgatcaacatggagaaacctcgtctctactaaaaatacaaaattagccaggtgtgattgtgcatgcctataatcctagctactcgggaggctgaggcagaactgcttgaactcagggggcagaagttgtggtgagccaagattgtgccattgcactccagcctgggcaacaagagtgaaactccgtctcaaaaaaaaaaaaaaaaaaaaaagcccagccatcatgaagaatcctcgaatgttctctgaagaaaatgatgctgggggctgggtgcagtggctcatgcctataatcccagcactttgggaggccgaggcatgtggatcacctgaggtcaggagttcaagtccagcctgaccaacagggtgaaaccctgtcactactaaaaatataaaaaagtagccaggtgtggtggcgggtgcctgtaatcccagctactctggaggttgaggcaggagaatcattggaacctgggaggcggaggttgcagtaagccaagatttcaccattgcactccagcctgggcagtaagagtgaaactgcgtctcacacttgatcttagccaaaaggctgagaagcactgaaccaaagccactgcgcccggctgggaaagttcttctttacagatttatagttcttctttatagattctttcttgctaagtgttgaaaagataactataatcatctaaagaggattaattcatcacttaggcaaagtagaggttagcaagaggaagttacttctcttagagtatgtgattcaaaggaaaaaattgctacatcaaatacacaccgactggctaaacatttctaggtacgtatcaatttctatgccactttcagattcaacacaatgaggaaattactggtgtaataaaaataacaaacattagattgatgaagcacggtaaaataatttcaaacaggaaagatgtatgaatcttttgtacaaaaaaatttcaacatataagttgcatacaagcaggaagatttaacttcataagagaattaacaaaagttgtattaattcaagacaagagcctgcagagactaaaattgcttagtactgaaagttttgcctatataaactgtagtttatgaagaaaaaagttttgttttttttgaggcagggccttgctcttttgcccaggctagagtgcagtggtaccatctcagctgattgcaacctccatttccgaggaaggctccttaatttcccaattataaaggttttgtgggaacataattgggtgtaataaaataaaaatttacaccacaagagacagacacatactcttcagggtgtatggtcataatttgtttgaacgagcccttttaaacttctagatatcattgaaactcctatgttgattaaaaatcatcaaagatctttccagtgagaaggatgaaaaatattactgagaatgaagtatcactatttcatgtatgtgcctgtatgtgcttatataacatgctgtaatacaaggtgacatttaggggctgagactgttaacatctgactgtaccttgctatttgtaacttacaatcttattcacatttctcaagtgccatgcctttaggtgcctatacatcatgctatcataggatttctagggataagccgagtgccgtggcagatgcctgtaatcccagcactttaggaggctgaggggggtggatcatgaggtcacaagtttgagaccagcctggctaacgtagtgaaagcccatctctactaaaaatacaaaaattaggtgggcgtggtggagggaacctataggcccagctacttgggaggctgaggcaagagaatcacttgaacctgggaggcggaggttgcagtgagccgagaccatgccattgcacttcagcctgggtgacagagtgagactctgtctcaaaaaaaaaaaaaaaaaaaaatttagggataatatctaagcccatataacctgctgttataaaaggtaacatttagggattgagatttttttttttttttttttttttttttgagacggagtctcgctctgtcaccaggctggagtgcagtggtgcaatctcggctcactgcaacctatgcctcccaggtttaacgaattctcctgcctcagcctcccaagcagctgggactacaggcacccaccactatgcttgggtaatttttgtatttttagtagagacagggtttcaccatattgtccagggtggtcttgaactcctgaccttgtaagccacccacctcagcctcccaaagtgctgggattacaggcctgagccaaaacacccagctgagattcttcatatagctgattatcttgccatttctaacttacaagctttatccacatttcttaaccttttgtttcactaaatgggacaggaagttttaactcttgtatccatgaagcatcttagtaaaataacagatattccatttgcaaattatgctccccaaaaaacacaaacacatatgtaaaaaatgttataaagacattaagtgtccactcaataactttgattcaaactatcttcatgttcttcacttcacaagataaagctcttaaaatggactttgtgaggttccatgtgtttggtcagtcatgagaggaagaataattcagagtgagaggaaacaagagagattctaggcagccctcagggaagctgaggaggtggctccctgcctccgggtccctcagaatgtcccatctccctgtcagtatcagtgtcccagataatcttcttctgactgggacatttcccaatttgggaacagtggttacttgccaaattcacatttacggccaaaactgtggctacagtgtcgacattcatgcaagtggggaaatgggcatgtggcccctgaaaaaagattctggattccataatctcaccttgctggcaagaaactaccatttcagcagaaagtgcaatgacagtgtctgcacagggactggagattatctccagaaaagagcttggagtgaggaaattagttaatgtggatgaatgacgttacccatggagaatgaagtaagtagctagaagacaaaagcctcagaacacataaatctcaacgggtactgagtagaggactcggagctctgaggtaattggagctcatggctatcccagaacttggataacataaagttcttgtttctacaaagtgtgtatcctttccatatgtgagaactctgaggaaatacaaacttggaacaaaagaaatagtaaggtaatcttagaaagatgttgaatagaaagcaagctacggtgacatcttaactgtttcactgcccagcaatctatacgtattgtcacttggggacacttatgattccacatgaagtggataaccagctcatagctcttgtggtactgaaaaccaagtatttggccgggcatggtgtggtgtactcgtaatctcagctccttgggaggctgaggtaggagaatcacttgaacctgggaggcccaagttgcagtgagccaagattgcaccactgcactccagcctgggtgacagaatgagactccgttccaatgcgaagtctcttaagaccaaggagagcagacattctgatgtttcccagattgacagcactcataaggcctttctccagtatgaactctcctgtgtttaatgagacgggatgtttcagcaaacgatttcccatattcactgcactcataaggcctttctcctgtgtgaactctgatgatgaaggagggtagagcttcgctgaaatgtttttccacatttggtacattcataaggcctttctccagtgtgaattctcctgtgtttaatgagactggaacattcagcaaaggattttccacattcactgcacttataaggcttttgtccagaatgaactcttttatgaacatgaagcgcagagctggaaagaaatgatttcccacattcattgcattcatacggcctttctccagtgtgaatcctctgatgtatagtcacgcagttcttattaccaaataatttcccacatacctcacacgcatatggcctttctccagtgtgaactctctcatgaacgagaagatgatacttcctgttaaataatttcccacattccctacaattgtaaggtctttccccagtgtgaagtctctggtgttcagtgaggtgggatctgtacctaaatgatttcccacattccttgcactcatagggcctttctccagtatgacctcgctgatgttgaacgaggttgcccttttgaccaaaagattttccacattctccacacttgtaaggcctttctccagtgtgaacacgctgatggttaataaagcagaacttctgacgaaaagatttcccacattccccacagtgataagctctctctccagtgtgaccttgctgatgttgaatgaggttacccttttgaccaaaagatttcccatattctctacactcataaggcctttctccagtgtgaacacgctgatggctaataaggctgcccttctgactaaaagatttcccgcactcctcacagggataagctgtctttccagtgtggactcgctgatgttgaataaggctgctctttcgactataagatttcccacactctccacaatcataaggtccttttgcagtgtgatctcgctgatgattactgaagctgacatatctgctaaaggattttccacaatcactgcacacataacatccatctctagtgaaaagtttctggtgtggaataactgagtgtttggtgctgaaggcttttgtgcgttttccacaactgtaattagtttttccctcctgaaagggtgggccatgcatagtttcactgtctgtcttctctacagcagctgcttcttggcacaatcctgaactgggcagaacgtccttcccaaactcgcggaagacaaatggctcctgtgacaccctgagcttacgtttctttacaaacgatgcttctctgacactctttctgtagaatttctctccaatatgctgcttctggtgctgatgaaggtatgcagtgtcatccaagttttttccacatgctccactcctgttcagcttctgcttgtgatgagtttcctggtggtcagcaaagtgaaaaacatcctccaagatgaggccacacatttcacaggggtgagccttcttaggagaaacacctgccctaggagtcctgctctgagactctctttgtacagaaattctctgcttacaaggtgcctcctcatcttttgatccacaccaacaacctgagagcaagaaaatgctggtcaagtgcaaagtacctctgacgggaaggcacagcccacccacaagtacgtctcacaaattgaggaattaatctatagaaatatttgcaggaacacaatgttggcttcaagttgaagatggggctgctggccgggcgcagtggctcacgcctgtaatcccagcactttgggaggctgaggcgggtggatcacctgaggtcagaagttcgagaccagcgtgaccaacatggtgaaaacccatctctactaaaaatacaaaaattagctggatgtggtggtgagcgcctgtaatcccagccactcgggaggctgaggcaggagaatcatttgaacccgggaggtggaggtttgcattgagccatgatcgcaccactgcactgcagcctggataacagagcgagactccatctcaaaataataataataataataaaaagaagaatgagctgcctagcattactgggctataaaggtcacagaatccaggaggcctcatgatgtaaagagcacaagcatacaggcaacacagggagtagaggcagggtccacagctccttcctctaaacacaagttgtgtacgggaccttatctcctaatgacatgtgagtgctatgtagaagcatatggactgggcgcggtggctcatgcctgtaatcccagcactttgcaagggtgaggcaagtggataacctgagttcagtagttggagacgagcctggctaacacggtgaaaccctgtgtctactaaaaaaagaaaaaattagctaggtgtggtggtgcaggcctgtaatcccagctacttgggcggctgaggcaggaaaatcacttcaacctgggaagcagaggttgcaatgagccaagattgtgccattgcactccagcttgggcaacaagagcgaaactccatctcaaaaaatataaatatagaagcatatgtcaagaccaagaaaacatgagtacaacacagcagagggtggtcatggatggtttaacatagggcatacacttcctaatatgtaatcgatacaccaatatcagagacaagtgcagatgaaagcacaagaaaaatgggtgagatgtgagtattagtgctggggtggatatcacagtagaagtgaaaaggtacagaactaacacgtgtgaaactctcaacaatggggagaaaaagacaaatagtgtgtgcctactcatattgccacaaaaacacttggcaaatataaatggtttctggtatgatttggataaacccctgaagtcatgccctcccccagcatggcactcctgagggacaggctccctttgagcctatcgtgatgagcctgaattgaaccacatcttgtcaaacatggaggtctctccatctcacacccagtacataggacccgacgatgtaactatgaagggagagacagcagagatgaacagccaacactagctcaggacaactaagcacctgacagcccacaggagagtaaggtaagtattacaaaagaattcctaagcagggtcttgcaagaagagtctatggtctatggtctatgtaggtagtgacaatgtcaatgaaggcaattcttggcacagggaggcacaaagcattgtcagatagaggaaggaagtgttaatagaacctgggcacacaagagctaccgatttggacagtcacctgacagccagagagcaggcaaagtggatacacttaggtgcctattagactcctgactctgactccttccctgggagcctggagcaaagcaggtgttggaggtgcttaaggaaaggaaaaggcaatacacacaacttacatagagaagtgtagaaggaacctgtgtccaggctccttaagtgagaaagacagtcctgtcaatgaaaaacaggggaacagtaacactagctcaggtcacaaaggtgagcgtgagcaacttacccagcgaggatatgagagccaggttctctagcatcacatcacggtacaagcacctctgagcctcactaagaagacaccactcctcctgggaaaagttcacagccacatcttcaaaggtcacagtgccctgctatgatagtgacagatgaaaccacaaacagcccctctgctgaggtaccacaacccacctctcccacacacccacacttgcccatcctcctcccaaggtccccaacatagtgttgaaactatgtccactagtgcctttgtctcttcatgggcccactggtcaattgccatcagcaataagcagtaagtggacaaataggtatccatgctgaggtcctgacataaaaaggtccatccccttctgaatagcgatatccaagctcatgtaaagcccagggcagctgcctgagcccattggacaaactccctctctaaatatacatcattctttatactgcaaagacacatccccatggccacccctacctgagttttccctaccatcagcctctctctggcatccccacaaatagaactttgttttttggggttttttttgagacatagtctagctctgtcacccaggctggagtgcagtggcatgatcttggctctttgcagcctccgcctcctgggttcaagtgattctcgtgcctcagcctcccaagtagccgggattacagccacgcaccactatacccggctaatttttgtatttttttttttggtagagagggggtttcaccatgttggccaggctggtcttgagctcctggtctcaagtgatccatccgccttggcctccaaaagtgagattacaggggtgggtcactgcacccagcccccacaaataaaattatttcacaagatgaagagggtataacggcccatgattcccttgggaatatgcaatggtttgtttccataactctgctggtagggatggaattgaaacccaccacaaaatataacaacctggaaccctgccttatcaccttgataaaacgggctgttaggctaggatacattattcaagagagcagagtgggaatgagatttgtactcacaccttttaaggttgtcccactttcacaagatgtcaaagtgacacatcatattgggccttcaattctggccttataccaaaatgtggataagcatccagactatgcttgacaaatacaaataggatccaatattaacacagaatttccatggtttacaatagcagtggtaatcccaaatcatcctgtgaacgtctcccggaatgactccatagccacacagaaccacatatggcttcagatatccatggacctatttcacttttgtgctgcaccagctgagacctcagctgtagcaaccctcctctgtccatctaatgctgtttaaagcccagcccctggatttgtgaaccaaaccacatctactatcacagatgagcatatttttcactgcccacatgcaccaagctgaatgaaactctccaggcactcccaaagtcatctcaaaacgtttatgaatccagacagtgataaatagttacaacttggcaccaactcaggcagaagtgtcatcttccttactcctatgcttctgcatgcatctatctcatctattctctcctcggatgtctatgtccccttccaaactctactgtctgatacatcctgccatgatgttcactcacaccctctcaggtgtttaggaagcccaataacatcactcagggacgtaagtaagagatccactcctcagcctgtagtcacaccttcctggcccctgaaaagatttaccaccaaaatctgaagcatgtcctcctaaatggacccataactaacttactgaagttcacccattagctttcaaatattggatgtctccagtatcaacaccctcccagataccccatcctgtatgtctagttatccatttaatgccaccatttattggtcactgactcttcatatggccaaaacaacactcttgatatccacagtcaatattatgtcaataccaacttcatgtcagctgatgcagcgtccatggttacagctgctaagatcaaaaaccttgggctcatgcctgattcctctttcatgcccttatcatccgcattagaaaacctagctgtctgtcaggcgtgatggctcatgtctgtaatcccagcactttgggaggctgaggcaggcgaatcacctgaggtcaggagttcgagaccagtctggccaatatgatgaaaccccgtttctactaaaaatacaaaaattagctgggcgtggtggcaagcacctgtaatcccagctaccttggaggctgaggcaggagaatcgcttgaacccgggaggcagaggttccagtgagccaagattgcaccactgcactccagcctgggcaacaagaccgaaactccacaaaaaaaaaaaaaaaaaaaaaaaaaaagacagaaagaaaacctagctgtctctttacaaaaagtgaatcctgtatccagactcatgtgatttgccacgtatctgatccactaaccctcacctggattatggcaggagccttatctctgacatttcttcctcttccctcaacccatagtgtgtgcaccaaggtccaaccagatgaagccggtagccagtagaactgtggtaatatcaccttctgactttgatcctttttatctctaagcatttcacaacctggtagcaaatcctgggttaatcttacaagagtgtttacactggctgacagaaatgggcatacttgcatataacctgccatggcctcagtatcctgtctttagagattctccagggtcctcggatcaaaggactgaaaaaatggcacttaagagtcccagcacaccacaagctagagaacctgtggatggggtcaagaccaatgaggggattgaacaccctccacttccctgtgtgggttccctaagtgcttctgcagccaggagtgcctgaggggagaggcagacattacaaacatgtcacgggatttgataagctcaggcctccctgaaccctttcttgtccctggaaccaggtaaccctacggctggttgtctgacctgcttgtctcagtgcaaaatgtcatctctaccacctatgtgagctacaaaaaggattcaacctcccaagaccccaaagtcttcatcctctctacgatattcttcctttgaatgtcctttgggaaaccttaaaagcctggatttggatcatgtccctcctttattcaaaactctccatggcttctagcgtcctcaccttgaatgcacagccctcggcctgcttactcttccagggagagctccacctcacactttgttccagacaggttccatcctcccggctccgtccatctccaggccattgcctgcgcccctccctgtgcttgttgctctccccaccgcatcccacgggtgtcagaaacaggtgaaaccgtctttgcaaaattataactgaggaaattatgacagtgaaagaaatcagaccttactgactccgtcttgcttccaacctttcagctgtccttgttcattcctgggtataggctgaattaacttagggaaggaattcagttcatggtttcactctgaaacaaaattgataatagccctttcctgaaaagacccccttcttgcctggagaacagcctgcctttgcaggactaacgaattagctacaaggttagaaattaccgtttaggggtcatgcagcttctgactccaagagtctgaacctccccaagttgctcctgaagataaatcactattgtaaaacctaagatcagtgcttgaggtattttgcagatcctgcactggatggatcagctgacaacacacagaccggtaatctgggtcaatcagttctgccatcccacccagaacagaaaacagcatgaaaaactcactttaaccctctatgaatccatctcaggtcccaacccttaccgccaaattaatgttgaaaactctgatcccggaatgctaatggagactgatttgagtaataataaaactcctgtctccagaacagcctgacggctctgcgtcaattactatttctccatcgcaattctccagtcttcataaatcggctctgtctaggcagctggcaaggtgaacccactggacagttacacagggacccccactggacagttacacagggacccctcctgcgagcgcctcagtgttcctacgccgggtaccggctacagacccgtgagcaggagccgctccctcgctggtttaggacctgggtgacgatggggtgacctgagggcacagaaggcgccacaattacctgagtcgggcgcctcggcgcagccgctgccatcggactacttggggaagcacggcccgggagcagtggtcgccgtcacggggctgcagagccgcctctgggcaccgaggacgattcctctccaccttctaggttcagtcaccgcggtccccccccagcactcaggggccacaaactggggaaacacccgcgtcaccgatacacagccgctactagagaccccggaagtctcagccttacgttacgtgcacacgtggaaatgccttctttccgagtgctcattggctctgaccggctgtcgtttaacgcagagctttctgggtaatgtagttccccactttccatggcgctaaaaagagcgatacccagagtccatctgcaggaaaagcccgccatcaggtcaggggttctccttaaaaagcgcacccttctggccgggcgcagtggctcaagcctgtaatctcagcactttggaaggcggaggtgggcggatcacgaggtcaggagatggagaccatcctggctaacacggtgaaaccccgtgtctactaaaaattcaaaaaaaaaaaaagttagctgggtgtggtggcgggcgcctacagtcacagctactctggaggctgaggctggaggagaatggcgtgaacctgggaggcagagcttgcagtgagctgggatcgcgccactgccctccagcctgcgcgacagagcaagactctgtctcaaaaaaaaaaaaaaaaaaaaaaaaaaaaaaaaaaaaaaaggcgcctttctagggcagaggaggggtctcacctagccttagaagccgtattgagattcctggagactagtgtctgtaactaatcactcaagaatctggaaaaatactgtttcagatttcggggagcgcaaggtaaataatagggagctcaagctaaaactattatttaggattctcctaaaggctaaaaatccaaattaccacaccgtttgaaacagtcgttcagtcgcaaaatacctgcactggaagcagaggctgataagcgttgttgtgttataatgtgtctgaaggccctcagaagccttagagtgcctaaggcaaatgaaggaagttagggatgtgctcccctatagcaggagtgcaaagctgaatctctgtgattcctacagaaaacaactctcctgctgatagaatctgtgaaaggaaaatcttgtggcctcaaaattactaagctaaagggaaaagtcaatctgggaactgctcagggcaaacttgcctcccattctattcaaagtcttccctctcctcactgagatagatgcctattctgattgcctcctttggaaggacttatcagaaattaaaaagaatccaactatttgtctctctacctgtctacctgtgacctggaagtcccctccctgcttcgagttgttcccgcctttctggtcggaaccaatgtacttcttacatatattcactgatgtctcatgtccccctaaaatgtataaaaccaacctgtaccccaaccaccatgggcacatgtcgtcaggacttcctgaggctgtgtcacgggcatgtgtcctcaaccttggcaaaataaactttttcttttatgagacggagtctcgctctttggtcaggctcgagtgcagtggcgcgatctcggctcactgcaacctctgcctctcgggttcaagtgattctcctgccttagcctcccgagtagctgggagtacaggcacgtggcatcacgccaatttttgtagtttcagtacagacgggggtttcaccttgtttaggatggtctcgatctccctcgtgatctgcctgcctcaccctccaatgtgttggggttacaggcatgagtcaccacacctggccagcaaaataaactatttaaattaactgagacctgtctcaaatttggggggttcacaaatcattatagcgttcaattaattgaacaacactttttcccacttagtatcctttacttgatattctaacttacattcaactccttttagtaatttgacatcagtcttataaagaacaataaggctgggcacggtggctcacgcctgtaatcctcgcactttgggaggccgaggcaggcggatcaccagttcaggagatcgagaccatcctggctaacatggtgaaaccccgtctctactaaaaatacaaaaaaaaaattagccgggtgtggtggcacacgcctgtagtcccagctactcgggaggctaaggcaggagaatcacttgaacccgggaggcagaggttgctgtgagctgagatcgcgccattgcactgcagcctggcgacagagcgagactctctcaaacaaagaaacaaaaaacaataaaataaatggtatcttggtagtagtgatggctacagtctgtaaaaagtaaagtacaggttcctcttcaaagactttcctcccatctaattaggaataaatagtaacttctcttagaagcaaaatttattcaaagacctgtgctaacattcttaaatatcttctagccgtaattaaaaaaatccatgtactttatgttcttagctcccacaatttagcctaaatatttgccctggcatgtttacactggtccaagcaagcattgtcatagcctgttcctcttatttgaaggtgtttttgcctttcttagcattccataagttaattcctccttcgttttcctcttgcctttgcctcttttaaaaatgttctaagttgctagtcaatcaggacaaatacagaatgtgaatttgtatttagccagtggaaaccggacacagcagtaaggtggatgcgtcaggcaggttataaatgaccctgtctcctttgttcagtgtaatctcacagcaaaactgctggcgagtataccgtttctgcagaaagtaaaaatggccttgctgaggaaattaaatttatgttcaatgctatttctttctttctttttttttttttgagacggagtttcgctcttgttgcccaggctggagagcaatggcgcgatcttggctcaccacaacctccgtctcccaggttcaagtgattctcctgcctcagcctcctgagtagttaggattataggcatgcgccaccatgcccagctaattttgtatttttagtagagatggggtctctccatcttggtcaggctggtcttgaactcccgacctcaggtgatcctcccacctcggcctcccaaagtgctgggattataggcatgagccaccgcgcccggccaagtcaagtgctatttctttacggcactaaagaacaagcatttcaaacagtacttaaagttggtgctctccatctgttcatactgggcatttgtaaaagccatgagttcatgtcattgatgggaagtgattatcattgatttgagaggagggagtgttctgcatgaaaaattaatattacataagagaaacagttgtaaattgcaagatacaaaagcctattaatactgactaggtaggctgggcgtggtggctcacgcctgtaatcccagcactttgggaggccgaggtgggcagatcacaaggtcaggagatcgagaccatcctggctaagacggtgaaaccccgtctctactaaaaatacaaaaaattagccaggcctggtggcaggtgcctgtagtcccagctacaggggaggctgaggcaagagaaacgcgtgaatccaggagacggagcttggagtgagcggagatcacgccactgcactccagcctaggcatctcaaaaaaaaaattagccaggcgtggtagcaagtgcctgtagtcccagctacttgggaggctgagacagaagaactgcttgaacccgggaggcagaggttgtagtgagcctagatcgtgcaattgcactacagcctgggcgacagagcgagactccgtctctctcccgctcccccaaaaatataaaaagcaaaaaacaagaaaacattgactaggtaattattaaacagttttgacagaagtgggtctatggaaacatcagtagatggtgaaaaagcttaggacctcagagaaatgttagcaccaatgtccaagagattaaattatgctcagcacataattggaatggtcagtctgatggttttggctttaaaatgagattcttcttcttcttttttttttttttgaggcagagtctcactctgtcacccaggctggagtgcagtggtgcgatctcagctcactgcaacctccgcctcccgggttcaagcgattctcctaccgggtgtggtggctcatgcctgtaattctagcactttggggggctgaggcgggtggctcgcctgaggtcaggagttcaagaccagcctggccaacatggtgaaaccctgtctctactaaaaatacaaaaattagctgggtatggttatggtggcgcacacctgtaatcccagctacttgggaggttgaggcaagagaatcacttgaacccaggagtcagaggttgcagtgagcagaggttgcaccactgcactccagcctgggtgacagagtgagactatgtctcaaaaaaataaataaatacataaaaagatgcctcagcctccagagtagatgggattacagacatccaccaccacgcccagcaaatttttggatttttagaagagacgaggtttcaccatgttggcaaggctggtatcgaactcctgacctcaggcgatccacctgcctcggcctaccaaatgctgggattacaggcgttagccaccatgcttggtcgatcccttttgaattaagttggttcatacaatcctccatccaacctcatggcatgataggtaattttctcacaacggaatacttgttttctgaaaggagttgtttataggttaagcaaaaccaatttaagagctttcagcaaagtaatatgaaaagcttctgttaatttcgccaggtgagagacagggtcttactctgctgtctaggatagagtgcaatggggcaatcatggcccactgtaacctcaaatccctgggctcaaatgatcctcccacctcagtctcccacacagctaggactataggcatttgccaccatgcccagctgttttggtagagacagggttgtgctgtgttgcccggctggtctctatcatgcttgatccctaccctgttgacttcaacaaggatggcaccatgtccaagaactgaatgagagccagagctagaaaatgagacatagagctaggcgtgtggctcacgcctgtaatcccagcactttgggaggccaaggcaggcggatcacctgaggttgggagttcgagaccaccgtgatcaaaacgcagaaaccccgtctctactaaaaatacaaaattagccgggtgtagtggcacatgcctgtaatccctgctacttgggaggctgaggcaggagaatcgcttgaaccgggaggtggaggttgcagtgagccgagatcacgccactgcactccagcctgggcaacaggagcgaaactccatctcaaaaaagaaagaaagaaagaaaatgagacatagggtttattgaggacttagatacagggcagtccaggagcggcaggctggacaaaaaaaccactatcatttgaaagaagcatgcagtttatatagtattttcacttatcaccctccgcctagctcaaaacaaagggcctcattccaaggaacaggccaggggttcagaaacctccaggttggccactcctggatttcttcgtttggaacgctgaaccaacactcttcttagaccacagggtcattcttagggtgtgcttgagttactgctgtcagatatatctgttatacagtgtcgaactcctggcctccaggatgttcttgccttagtctcccaaaacactggaattaaaggcatgagtccctgtacatgacgagatgggcttttattaacctctttgttagtttcatcaatcgagaagagaggggagggtatgcaaaataaaaatgttagaaaatgggccacactttacaaattgagattatgtctccagttaaatgagttcccctattgctgtgtaattcacaagaaattctccaagagggagttaccaattcaacacatatttacccatgacttccacggtggctcttctgtaaggaaatgcttgaacccaaagagagaacatgcagatcataatcagttcatatttataatcttgggctggaggcaaatgcatacagtttaccaaatatgaaaaggtgaggtgggcaaagggaaatgcccttgagatccctgaaaagaaagaaaattcagttatacatttgatacttaaatatatgggacaccactttgttaaattgcaagaaaaaaaccaaaagcatgccaggcacagtggctcatcctgtaatcttagcattttgagaggccaaggtgggaagatcccttgagctcaggagttttgagagcagcctgggcaacatagtgagacctaatctctacagaaaaattttaaaaattagctgtgcgtggtggcacatgcctgtccctagcaacttgggaggctgaggtgggaggatgacttgagtccagcaggtcaaggctgcagtgaattgtgattgtgtcactgtactccagcctgggcaacagagtgacactgtctcaaaaaaaaaaaaaaaaaaagggccaggcactatggctcatgcctgaaatcccagcactttgggaggccgaggcgggcagatcatcacaaggtcaggacttcaagaccagcctgaacaacatggtaaaaccccatctccactaaaaatacaaaaattaaccgggcatggtggtgcatgcctgtaatcccacctacccgggaggctgaggcaggagaatcgcttgaaccctggaggtggaggctgcagtgagctgagatcgtgccactccagcctgggcagacagacggacattctgtctcaaaaacaaaaaaaattaagaaagaatcaaaagcaactttctaattcattgcagacgggagtatttttctatttagtgacacacttacctaacccatttatgccaagggatgcaaaatatatatatatatacatatacacacacatacatatatacacacatatatatacatatatacatacatatacatacatgtatatacatatatacacacacatatatacatatatacatatatatacatacacacacacacacacacacacacacatatatacacatatatatatattttttgagaccgagtcttgctctgtcacccaggctggagtacagtggtgcgatcttggctcacggcaagctccacctcccgggttcactccattctcctgcctcagcctcccgagtagctgggactacaggcgcctgccaccacgcccagctaattttttgtatttttttagtagagacggggtttcaccatgttagccaggatggtctcgatctcctgacctcgtgatccgcctgcctcagcctcccaaagtgctgggattacaggcgtgagccaccgtgcctggccactttcatgggtttctatgaaagtctaaacttaccacatggtacagtttaaatatgtatagtttacagaatgtcatttattccttattatggctttaaagaattgattcaaaagaaaaatgtgggctggacatgatggctgaggcctgtaatcccagcactttgggaggctgagggaaaaggattgcttgaggagttcgaggctgcagtgaactatgatctcgccactgtactccagcctgggtcacagagcaacaccttgtcttagaaaaaaaaaaaaagaaaaacatggattttctattatttttgacaaacatgcttgacaactatacaaaatctcctcatgtcctaagtgcagcaatgagtctctgcggcagcaaatactgataagccaggaaggccattttcacctgattaaattggaacactggttggtcacaaagaccacatcactggactaagagatctcccttctccctatcctcttcctcctgccaatgcaggaattgccttgaggtgaacagccgagaaagggtacaggaatccacgaatcctttatattatttcctttgacaatggcctcagctacacaagattcataattatggaggttctgagaatttctgtacctgacagtccaccacatacatagtaactgaatcaatgtggatgacgtgcattccaactctgttcttgcagtgtcctccactgcctataaatgcagaaattctataaattatgacttcctgttataatctcataacctgggacaccacactacgaaactctggatatcagagcacatggctgcattccaggacctagggaacagatttccctcagcagtactgagcagaatgcaatatcccttgtaaaagagaggaaattttcgtgtcgatctcagaagcatcagaggatgtcacaaacactgttcccttctcaggtttatctataaacccagaaattattggagtatctagtcaacaaataaggaccacaaagttctggagtctttggaggccttgggcagccatgaaaactatgccacaagtgaagagacagtatattctgtcatcatactgtcccctctgaggcacacaaagtctagtgatcccaacaaaagctgtctgcccctttatgacaccagaacccagttgtttccaaaccacccgaaagagtaaatacaactctcaagactgaaggaagcttaaacaataaggccttattcattgcacaaatcagagcaatgggaagcagaatgttctttggttggaacttaagagcctaaagaatcacatgagacccgctgggtgcggtggctcacgcctgtaatcccagcattttgggaggccaaggagggcagatcatgaggtcaggagatcgagaccatcctggctaacacggagaaaccccatttctactaaaaatacaaaaaaattagctgggcatggtggtgggcacctgtagtcccagctactcgggaggctgaggcaggagaatggcgtgaacccgggaggcggagcttgcagtgagctgagatcacgccactgtactccagcctgggcgacagagcgagactctgtctcaaaaaaaaaaaaaaaatatcacatgagacccataaggtccctgaaaaaggtagtccatcttttcaagctgacagaagacccctctggaccagtactgagacagatccatggtctcgctcatccgaaagaaatgagaaaggaatgacagctgagactactcaccaattcctctggccaacgaaagacaaccaaggtttacttccagaacatcatggggtgaatgaatgatgcacagtgaacacctgcctcgtggccgacataaaatggcttttgccagataaccgacatcatgtctggcaagggaacccggcagggtgaaaaatgccacacagctccaacataattgagtttatgcagatgctgaaggtatgtcaatttaggcagatggctccgtcataaggcatctcctccagtgttatgttttacaagaaataatatttcctgtacgtgtacagtgttttccttatgagaacaatctgttatccaatgacagaaggcagaaggctttctcacattcatcgcactcaagaggcccttctgcagtgggagctcttctgtatgtaataaaacaagacttctgcataaagaatatcccacgtttgtcacactcataaggtcctgatccagtaagaaccctctgatcaagaagatgcacagaggtttagctaaagaatttcccaaatttcttttcacttgtaaggacttctttctgtgtgaactctctgatgtcgaaggagagaagagcttcgatgaaatgattttccacattcactgcactcataaggcctttctccagtgtgtactctcctgtgttcagtaagactgaaggtttcagcaaaggatttcccacattcgctgcactcgtaaggctttcctcgagtatgaagtctctgatgtttaaaatgcgcagaccttcgagtaaatgtttttccacattccctgcattcataaggcctttctccagtgtgaactctcctgtgttcaaggagactggagaagaatttcccacattctctgcactcataaggtctttctgcagtgtgagttttctgatgtcgaaggagggaagagctctgatgaaatgactttccacattctccacattcataaggcctttctccagtatgaactctccgatgtcgaaggagggaacagctttgaggaaatgacttcccacattcactacactcaaacggtttttctccagtgtgaactctctgatgaacacgaaacccagagctgtcttgaaatgatttcccacattcattacattcatatggcctttctccagtgtgaactctctggtgttcaatgaggtgggacttgcccctaaataatttcctacactctctacactcataaggcctttctccagtgtggcttcgctgatgctgaatgaggttgccctttcgactaaaagatttcccacattctccacactcgtaaggtctttctccagtgtgacctcgctgatggttcctaaggtgtccctttcgactaaaagatttcccacattctccacactcataaggtcgttctctagtgtgaactcgatgatgttcagttagggtgcccttttgactaaaacattttccacattcttcacactcataaggtctttcactagtgtgacctcgttgatgttgaatgagattgcccttctgagtaaaacatttcccacattcttcacactcataaggtctttctccagtgtgaactcgttgatgtttaatgagagtaccattttgactaaaagatttcccacattctccacactcataaggtctttctccagtatgaactcgctgatgctgaacaaggctgcccttatgactaaaagatttcccacattctccacattcataaggtcttttcccagtgtgaactcgctgatgctgaacaaggctgcccttatgactaaaagatttcccacattctccacattcataaggtcttttcccagtgtgaactctctgatgattactgacgctatcatatttgctaaaggatttcccacattcccagcaataacattcctctctagagggaagtctctgctgttgaacaaatacgtgtttggtgctagaatgtttcatgcattctccacagctgtaatgagtatctccccactgaaagggagactcacactcaggtttgctgtttgacttctccccagtgtgagtggcctcctgcagcagtaatcctgagctgggcaaaaagtcctttccactctgaatgaagatagatgactcctctgacacatggaacttacacctcttcacaaacaatgcttcctcaacactgcttctatagggtttctctccaaggtactgattctggtgcggacggtttgaactatcatacaatttattcccccatgcctcacacctgtgcagtttctgcttgtgatgtgtcccctgatgatctgccaagtgcaaaatgtctcccaagatcgcgccacacatttcacaagagtgggccttcttgggagacacacctgccccaggagtgctgacctgagacactctttgtatagaaatgctcttcttagaaggtgcctcctcatcttctgatccacaccaacaacctgaaagcaagaaaatgctgatgaattcaagttaactctggtgggaaggcacagcccacccacaagcgtgtctgacaaaccaaggaattactccatggaaatatttgcaggaacagaaagttggcttcacgtggaagatgaggctatcattactgggctataaaggtcacagaatgtcggcctcatgatatgaagggcattagcatacatgcaacacagagaattgagccaaggtctacaattttttttttcttcttgagagacaggatctcactctgtcatccagcacagagtgcagtggcataatctctgtctcctgggctcaggtgatcctcccacctcagcctccacagtagctgggaccacaggcacaggccaatacgcccagctactttttgtagaggtggggtttcgccttgttgcccaggctggtctcaaactcccaggttcaagaaatccacccacatcggcctcccaaagtgctgggattacaggtgtaagccaatgcacctgctgtataactctttcctttgcaaaccacttgtctgcgggaaattatctgatgacatgttaatgctatatagaaggctatgtccaggcctaagaaaatgatttacaagacaacagctcttggtcagaacagtttaacaatttgcacacacttggccgggtgcggtggctcacacctgtaatcccagcactttgggaggccaaggtgggtggatcacgaggtcaggagatcgagaccatcctggctaacacagtgaaaccccgtctctactaaaaatacaaaaaaattagccgggcgtggtggcgggcgcctgtagtctcagctactcgggaggctgaggcaggagaatggcgtgaacccaggaggtggagcttgcagtgagctgagatcacgccactgtactccagcctgggcgacaaagagagactccatctcaaaaacaaaaacaaaaaccaaaaacaaaacacaatttgtacacacttgctaatacacaatgtgtatgccagtatcggacagcactctagaagtaaacatgagaaaataaatgggtgagatgtggagtccagagactggaagattcgttgggggatggacatcagagtacaagtgacaaggtgtacaactgacaaatctgatgctctcaagaatggaaaggaaaagacagaaacagtgcctactggccacaaaaatactagtcaaatagaataggtttctgatacgatttgaagaaaatctcgaactcatgccctcccaccaggtgccactcctcagtgacaggctccctctgagaacatcaggctgagcctggattcaactgcctcttctgcagcactgaggactctccatcccaccatcacaatgatgaagtacatggaacctggatgatgtaagtactaaggcaaagatagggcagaactggggcaactagcctctgtggcagcaaacagtgatgagccaggaaggccatttccacctgattaaattgaaatgctggctggtcacaaaggccacatcactggactccctatcctcttcctcctgccaatatgtgctggtagttttcagcaacagtggttcaaaacatgacaacacacaggaaaggaaactaattactaaaaacagaatttcttttttttttttttgagacggagtcttgctctgttgctcaggctggagtgcagtggtgcgatctcagctcactgcaagctccgcctcccaggttcacaccattctcctgcctcagcctccctagtagctgggactacaggcgcccgccaccacgcccagctaatttttttgtattttttagtggagacagggtttcaccttgttagccaggatggtctccatctcctgacctcgtgatccacccgcctcggcctcccaaagtgctgggattacaggcgtgagccaccgcacccggcctaaaaacagaatttctaaggagggtcttgcctttggtctatgtaggcagtgacaacgggagtgatggcaattcctgccacaggcaggcatcaagtaatgtcagctaaaggaaggaagtagaacctggacacacaggagtctcagatctggacaaagtcaaacagcaacacagggacatgcaaggtgaaatgcattagattgactacgagacacctgactctaactccttccctgagagtctgcagcaaagcacgtattgggactgctcaaggagaaaaggcagtacacaaacctcagacctaccaaccacaaaacctacccagagaagtggagaaggaagctgtgcccatggtcctgacatgataaaagacagtcttgccaatgggagaaaaggggaagggcagagatctattcaggaaatagggtagggtgtgaggaacttacccagggaggatataagtacccagttctccagcatcacgtcatggtaaaggcatctctgaacctcactaaggagactccactcctcctgggaaaagttcacagccacatcttcaaatgccacagtgccctgctatgatggtgacagatgaaaccacaaacagctcctatgctgaggtaccacaatccacctctcccacacccccacccccttgcccatcctcctcccaagatcctcagcacagaggagaaactagtccactggtgcctttgtctcttcgtgggcccactggtcactcagtatagccatcagcaattaagaagtaggggaaaaatagggatctatgctgtgcttgtttttttgtttttctgagacagagtctcgctctgtcacccaggctggagtgcagtggcatgacctcagctcactgcaacctctgcctcctgggttcaagcaattctctgcctcagccgcccgagtagctgggattacaggcacccaccaccacttctggctcatttttgtatttttagtagagacagggtttcaccatcttggccaggctggtcttgaactcctgacctcgtgatccacccgcctcagcctcccaaagtgttgggattataggcgtgagccaccgtgcccggctatgctgtactcttaacataaaagggtccaccccctcctgacagctaatgcctgtggtatatccgagctcacataaagcccagtgcagttgcctgggtccattagacgtactccctctctaaatacacatccttcttttttttctgagatggagtttcgctcttgttgcccagacaagagtgcggtggcgggatctcagctcactgcaacctccacctcccaggttcaagcaattttcctgcctcagcctcccaagtaactgggattacaggcacccaccaccacacctggctaatttttgtatttttagtagaaatggggtttcaccatgttggctaggctggtctcaaactcctgatctcaggtgatccacccacctcggcctcccatagtgctgggattataggcataagccaccacgcccggccttacacatcattctttagatagcacaggcacatgtcacggccagcccaacatgacatcccccaaccatcagcttcttttgagccttaacacaaattacagttttggtttcttttagtcaggttctcctttggtcgcctaagctggaggggagtagtgtgatcatggctcatggaaagttcaaaccccttagccccaggcctcagccttctgtggagatgggatcttacgtatgtgcaacatcaaccactttcttttaagagatggggtgttgctaagttgcccaggctgatctcaaactcctggcctcaagcaatcctcccacctcagcctcccaaagtgctgggattacagcatgagccttcaagcctggccaacaaagtattttaatccccttcttttccttctactgctctgagtgggattctccccttagggttatagtgttggggaaacaattgacacctgagactgtacatatgccatccacagcaatttcaaaatcaaataactcacagcctggcagagagggccacatgggggttgcactgtggacaacaaatggaaaccagggacagtgttatgcacactttgtaggatgaagagggtgtgatagcccctgatttctcaggagggtgccactgacttgcttaaataattctgagtagaaatggaattgaaacccagtacaaagtataataaccagaaactgtgcctgatcccttaatgaaaagggttgttaggccaggatacattatccaatagaacagagtgggaaggggatttgtgctcaggccatttgaggtcatacagtatcaccacacaccaacgttgcacatcacattggcctttcattttcggccttatgccacaatgtggctgacagaattcagagtatgcttggcaaattcaaacaggatccaatattaccacagaattctcatggctcccaatagcaatgcagtcccaagtcattctatgaaggccttcttgcatggctccacatccccacagaaccaggtggggctttagatatccatggccctattccacttctgtgttgcacttggtgacccctctacaatgacgactttcctctgtccacctagagtcatttaaatcccactcccttgttatggagaatggtctaagaaaagtggaaaacaaaagaaaaaaataaataaaatcccagcccatcagctgtccaccccaggcccaatgtctgtcacagataaccaaatttaccctgagcatgtatccaccaggccgaatgaaaacccccaagcaccaacaaagttttctcaaaatcttggtgagtccacagagtggtgaataagtaccagccttggcccaagtgtcatcttccttcaattatttctatgcttctgcttacatctcttatctattctacccttggaaagcctatgccccctgacaaaccatgttgtctgacataccctatcttcatgagcccttgcctccttctcctgtggcaatgtcagccagggacccaagcaagaaattcagccctcagcctgcaaccaccccttcctggcccccacaaaagatttaccatgaaaatttgaagtgtgtcaatgtcataatggaggctaaactatctcagactcttaacatggtcaaaacaacattcttcacatccccaatgaatattatacctactatgtgctcatctcagttgatgcagcttccatcactgcagatgctaagaccaaaaacctggtggtcatacctgattcccctttcatgccctcacagtctattagaaaatctagttaccgaccgggcttggtggctcacgcctgtaatcccagcactttgggaggccgagacgggtagatcacgaggtcaggagatcaagaccatctggctaacacggtgaaaccccatctctactaaaaatattaaaaattagccgggcatggccgggcttggtggctcatgcctgtaatcccagcactttgggaggccgaggccgatggatcacgaggtcaggagattgagactatcctggctaacacagtgaaaccgtctctactaaaaaatccaaaaaattagctgagcatggtgacgggcgcctgtagtcccagctactcgggaggttgaggcaggagaatggcgtgaacccgggaggcagagcttgcaatgagccaagatcgtgccactgcactccagcctgggcgatagagcgagactcccgctcaaaaaaaaaaggaaaatctagttgccattttacaaactgtgaatcttgaatccagccacagctccttactcattaatatggtccagtaaccctcacctgcattatggcaggagtttaaactctgatcctccttcctcctccctcaaacacagtgtgttctcttctttgcagccagatgatgcctgcagacaaatgggactgtggtaacatcacctcctcgccgccctcttgcctccccaccgaatttttacctctaagcatttcatgacctggtaccaactctgtagttaaccttcaaagtatgtttacatgggttgacagaaatgggaatacctccatacatcctgtgtcatggacttaggattctgggtttagggtttctccagtgttctcagatcaaaggactgaaaaaatggcaagtaagagtcccaggacatcacaagctagagaacatgtgaatggggaataaggccagtgagggaatggaacaccctctaattccctctgtgggttcctttttttgagccagagtttcgctcttgttgcccaggccggagtgcaatggctcaccgcaacctctgcctcccgagttcaagcaattctcctgccttagcctctgagtagctgggattacagtcatgcggcatcaccacgcctggctaattttgtatttttgttagagacggggtttctccatgttggtcaggctggtctcgaactcccgacctcaggtgatccgcccgcctcggcctcccaaagtgctgggattacaggtgggagccaccttgcccgaccccctcagtgggttctttacgtgcttttgtagccaggagtgtctgaggggaaagcagacgttacaaaggggatctgataagctcaggtctccttgaaccttttcttatcgctggagccaggtgacctcagactggttgacctgcgtgtctcagtgcaaaatgtcatctctaccacctatgtgatctatcaacaaaggagtcaacctcccagaaccctaaggtcctcatctcctctactatgttcttcctttggcctttgggaaaccttaaaagcctggacttggatcgcatccctcctttcttcgaaactctccatggcttctagcgtcttcacagcgaatacacagcccccagcctgctcttccaggagaagcttcgcctcacacgttgttccctacaggcgcctgtggaccccaggttccatcctcccgggtctgtcctccaggccatagcccgcgccggtccctgtgcctgtcgctctccccaccgcatcccacaggtgtcagaaacaaggacctctcccgcgaacgcctcagtgtcccgacgccgggtccgggctgcagacctgtgaacagtcgccgctctctcgctgcttcaggattcgggttaggatgaggtgacctgagggcagggaaggcacaattacctgagccgggagcctcagcgcggccgccgccatcccgagtacgcggggaaagcactgccgggagcggcgggcgccgttacggggcctaagatctgcctctgtgcagcaagaaggactcttcaccttctgggttcagacaccgcggttcggacccatagctccagcgcctctcacctcacaaaccgcagaaacacacccaacattaaccaaaatggtcgctaccagagaacgctgagaatcccgccactacgttacgtgcgcacacagaaacgcctttattctgagcccttactggttctgttgcgctgtcattcaatgtagagctttctgggtaatgtagttccccaggttccaaggtagtaaagctgccgcttcccaaaggcgcttctgcagggaagtcccagccctacctcagggggttcattaaagcgcgtacccttttagggcagaggatggtctcgcccctccttagaggccatattgagattcctggggaatccctgtttgtaactgaccacctaagtgtttgcaaaaatattaattcacatttctgtaaattcaagctcccaggcgctaaaaatactgtgaaggcccccaaaggctacaaatccaaattcgtgtatcactttatacaatcgtttagacacagaatgcttgcactggaagcagaggctgataaacattactctgttataattcacatgaatgcactcttgttaccggatagaatgtcttggctgtgagttgtccagttgttggcgcattgaacaaagaagtgaacaaaacacacaaaaaaagcaacgaaagaacggaccaatgaaagcgcagatttattgaggggaaagtacactccacagaagtggaatgtaggtgtgggagcaggcgaccaagcggctcaagaaccccgattacaatgttttttagggttttattaggttggtgcaaaagtaattgcggtttttgccatgaataagctagaattttataataccccaagagttctttaaaggcctccaatcctatgaaggactggtgcacaaccaatcagaggctgaagtggagacttctgtcttgttaccacaggagtgaggacgtggcctgtgtgctgcctcatcttgcctagaactagctgcacctgctgttcttttgcttatgccttcattcttggttaccctaattccctattctcctgcctcactctgaggcattagagttggtttttcagtctgccagggacaaaagagaactaatccagataggaccatgccaaggaagatagaggagaggctaaagaaagagtacaaaggtcaatcagtcgttcccatggaaaaacaactctcctgcttatatagtcaattattgtgtccaattcattcagcaaaacatttattcatgtaatatcccttacttggtattctaacttatattttcaactcattttaggaacttgaagtcagtctcaggtaaagaacaatgaaagagaaatctcagcttggtattggtaatggtggtgataatctccacctggagacactaggcgtatgttaaattatcgagcttgttatctttcctgggaagtgattatcatttgtttctcttgtgacagcggggagtgttctgcatgaggaactaatatgataccagaaaaacaggtgaaatgccagttacagaaacttattaccaacgactatctaataactgcgatgacagaaataggtcaattgaaacatgagtggatggtgaaaaaaatttacacttcacagaagtttttctttctttttttttttttttttttttgagacaaagtctcgttctgtcccagactggagtgcagtggcgccatcttggctcactgcaacctccacctcccgggttcaagcgattctcctgcctcagtctcccaagtagctgggataacagatgcctgccaccacgcccagctaatttttgtatttttagtagagacaaggtttcaccatgttggccagactggtctcaaactcttgacctctgacctgcctgcctccttctcccacaatgctgacattacaggcataagtcactgctcccagctgactttacaggtgtttgtttgtttgtttgtttgttttgagaaggagtttcactcttgttgtccaggctggagtacaatggcacagtttcagctcactgcaacctcctcctcctgggtcaagcaattcattctcctgcctcagcctcccaagtagctgggattacaggtgcctgccaccacactcagctaatttttgtattttcagtagacacaaggtttcaccattttggccaggctggccgcaaactcctcacctcaggtgatccacccgaggtggcctcccaaagtgctgggactacaggtgtgagccacctcgcccggcccagaagttttaacagtgatgtctacgaagagatggaattaaggtcagcatgtgattaaaaatgtcccccttgttggttttgtcattgagatttttttttctttattaaaaacattgaacaataccaaggtggagaaaaattgtgcctgttcacctacctacttgggaggcttagagggaggatcacttctgcaaaggagtttgaggccagcctgggcagcagagcaagactctgtctccaaataaataatttaatgaataagtaaaaacagaaggtgaaatctgcagtatagtattatcctcatagaattgtgtctccctttcttcattattctgtgtgtcaattatgttacaagtttttcatcttataggaaaaaagtcatagattctatacacatctgtactttttctcacttagcaatatggtttgaacaatgaaaagcttctttttcacttcacatttgaaatctgcttatctccacattctatttttttctcccctttttgagacagcgtctcactctgttgccaaggctgaagcgcagtggcatgatcaaggctcaactgcagtctcaacctctcaggctcaagtgatcctcccatctcagcattcaggagtaattgggactataggcatgcaccaccacaaccagctaatttttgagagatgtggttttgccatgttgcccaggctggtatcaaactcctgagttcaagcaatcctcctgcctcggcctccctaagtgctggcattataggattcggccactacacctggcctattcatctttttctgatgtagaacccactcagtgacagtgtaatcaagaatcaagaaagaggccagatgcagtggccatgcctgcaatcccagcactttgggagcctaaggtgggcagatcacttgaggtcaggagtttgagaccagcctagccaacatggcaaaaacccgtctctactaaaaatacaaaaattaggtgggtgtggtggcgcacatctgtaatcccagctactcgggaggctgaggcaggagaattgcttgaacccgggaggcagaggttgcagtgagctgaaatcgtgccactgcactccagcgtggacaacagagcaactccgtctcaaaaaaaaatagagccagaatacaatacacaagcaactgaagtatttcaacagcaaagaaaccctcaaacaatccaatttaaaaatgtcaaacgatctgaataggcatttttcaaaagacaacatacaaacggtcaaaaatatattaaaacacactcatcactatctgggaaatgcaaatcaaaaccgcaatgaggtatcactctccccgtttaggataattattatcaaaaagacaaaaacagacgctggcaaggatgcagagaaaagggaactaatggccaggtgcggtggctcacatctgtaatcccagcactttgggaggccgagctgggtggatcacgaggtcaggagttcgagactgcctgaccaacgtggtgaaaccctgtctctactaaaaatgcaaaaattagccaggcgtggtggtgcgtgcctataatcccagctactcaggagactgaggcaggagaatagcttgaacccgggagacggaggttgcagtgagccaagatcatgccactgcactccagcctgggcgacagagaaagactccatctcaaaaaaaaaaaaaaacccaacaaaatacaagaaaagggaactcatgcactggtggtgcaaatgcaaaccagtacagccattatggagaacagtattgaggtccctctaaaaactacaaatatgccaggcgcgatggctcacgcctgtaatcccagcactttgggaggctgaggcaggcggatcacgaggtcaggagttcgagaacaccctaaccaacatggtgaaaccccgtctcttctaaaaatacaaaaattagcaggggtggtggcacgcacctgtaatcccagctactcaggaggctgaggcaggagaattgcttgaacctgggaggcggaggttgcagtgagccaagatcacaccactgcactccagcctggataacagagtgagactctgtctcaaaaaacaaaacaaaacaaaacaaaaaactacaaacacaactaccatatcatccagcaatccccctactgggaatttatccaaaggaaagaaaatcatcacattggagacacatctacaccccgtttactgcagcactattcacaatagccaaaatatggaatcaacctagatgtccaacaacagataaatggataaagaaaatgtggtttatacacacaaaggaatactattcaaagaacagaatgaaatcctatcacctgaggcaacatggatggaaatggaggacattatttaagtgaaataagccaggaacataaacatgcacattcccactcatatgtggaagctttaaaaaaaaaaaaaaaaagctgggtgcggtggctcacgcctgtaatcccagcactttgggaggctgaggcgggtggatcacctgaggtcgggagttcaagactagcctgaccaacatggagaaaccctgtctctactaaaaatacaaaattagccggggtggtggtgcatgcctgtaatcccagctactcaggaggctgaggcaggagaatcgcttgaacccaggaggcagaggctgcggtgagccaagatcatgccactgcactccagcctgggcaaaaagagtgaaactccatctcaaaaaaaaaaaaaaaaaaaaaaaaaaaaaaagcctgggagacaaagcaagactgtcccccacccccacaaaaaaaagttgatctcttagaagtaaaaagtagaacagaggatactagaggctgggaagggtagtgggtaggcaggaatagacaaagattggttacaagctacaaaattacaactagacaggaggaataagttctagtgttctataccactacaggagaactaaagttaataatatataatttcaagttgttaggagaatggcaattgagactgactgttcccaatataaaggaatgacgaatgtttgaggtgatggatatgctaattactctgatcactctaagttataggtatcaaaacatcactatgtactccaggaacatgtacaattataatttgtccatttaaacacaaagaatttttttaaaaaaagaaaccatttggttttctgtgtggatatgagacaaagtagtatgtacacatataaacttatttgtataaaacaaaattcagagaacatatactaaatataaaacatggttattgaaaatacgtatttatttatttatgtctgtgaattttgcagggacacttctcagtccgtaacagccctatgtgtgttacctaacctttatcccttgtgaacgttctgatgttttaggaggttggagttgaaggtaaaaaattttccacagtcactacactcataaggcctttccccactgtgaattcgctggtgattagtgaggttagagctctggctaaaggattttccacattcactgcattcataaggcctttctccggtatgaactcttcggtgtttaacgaggctagagtggttactaaaggatttccaacactcactgcactcataaggcctttctccggtgtgacttctcctatgtctaatgaggctggagctctggctaaaaaacttcccacattcattgcactcataaggcctttctccagtgtgaactctctggtgttgaaggagcgtagagctatgagtaaatgatttcccacactccccacattcataaggccttgctccagtatgaactttccagtgtgagatgaggtaggatttacaggtaaaggattttccacattcactgcactcatatggcctttctcctgtgtgaactctctcatgtacaatgaggtcaaatttcctgctaaataattttccacattcatgacattcatgagatcttactccagtatgaactctctggtgttggaagaaacgagatctataagtaaacaatttcccacattcactacactcataaggcccttctccaatgtgaagtctccggtgtttaatgaggtgacagctctggctaaaggatttcccacattcactgcacatataaggccttgtaccagtgtgaactctctggtgtgtaataaggctagaactatggataaaagatttcccacattcactgcactcataaggcctcattccagtatgaattctctggtgtgtaatgaggctagagctatggctaaaggatttcccacattcactgcacttgtaaggcctttctccagtatgaactctctgatgtataagaaggtcatacttcctgttaaataattttccacattcatcacattgatgaggtcttactccagtgtgaattcttcggtgcgtaataaggctagagctttgcctataggatttcccacattctccacatgtataaggcttttctgaagtgtgaactctcaaatgatcactgaggctacagcttgtgctaaaagatttcccacattcactgcacatgtaagatctttccctaatgaggtctccctggtgctgaacacgtacatgtttgtagctgaaagctttcacacattctccccagttgtaatgattttttacactgtgaaaggccactgcactcttggttctgtttgacttctttctggtgtgagcagcctgttgctgaagaaatcttgatctcaccaggaaatccttcccaacctccttgcaagtgaagggcttcccagatacttcaaatgtgcagctgctcaaaaacatgtctctgcccccattgcttctgaagtgtttctgtccaacatgctgcttctggtgctgatgaaggtatgcagtaaattgtaattgtttcctacatgccccgtctgtatacagtttctgaccatggtgtgttccttggtgttcaaccaagtgcaaaatctgtctcaagactgggccacatatctcacaggggttggtcttctggggagaaggaagggccttaggaatcctaacctgtgacacccgctgtggagaagtgctctgctgataaggtgcctcctcatcccctgctccagaaccacctgaaagaaagaaaatgctggtgaagagcatgctgactttagtggagtggaggtagcccacagacaaatgtgcatccaacaaacccaggaactgagtccatggggttgttttcaggaccaaggtgttgggttcaagttgaagatagggctgcctagcagaactgggcctctaaagatcacagaactgggaagggctcatgagttaaaaaacacagccatgggatgagaaacatggagaagaggcaggatatacaactcattcctctagaacaattttcagtgagatctgctgtcctgctaacacatgcattgtgtacaggtatgtgtccaggcccaagaaaatgtgacaacaaaatagcggctgacatacgtggacacctcataacatattatgtagaggccaacactgaagagcactgcagataaggcagtgagaaaaatgggtgaaacatggagtccagagatgtggggattaaccccaggctggaagtaagagacgtagtaaccaggtggacagctgacaagcaagctaagtatcaagaatgggaaagaaaaggcagtaatgaggtttggccccaaatgtcattagcaccaaaatattagtcaaacaggatatgtttctggtatgatgtgaacataacccttatagaatgtcctcctttaggtgttagtccctagggccaggctccctctgagtccatcttgctgtggggaatcacagccatcctcagaaccacagggcctgtccatctgacccctacaatcaagaacacggaacttggaatatgcaagcacccaagaccagcccagaatgactctgcacatgatagcctacaggaaaaaaaataataatacaaggagaaattcagaggaggattttgcaagagccactcgtagtccacataagtggtgacaatgtcagtgatgataattgctggcagaggcaggcatgaggaagtgtcccctagaggaaggaagtagaacctgggccttgaggagcctcgaatctggacaatgtcacctggccaggagaggcaaacgaggtgagatccatgaggccgactataagaagcctaactctgaatctttccacatgaaagggaagcaggtgttgcttgctcaaggagaaaagcaggcaacatacaaccttagccctaccaaccgcagcacctgcccaggaacaggaagctgtgtcaatagtcctcttgtgaagacacatctgactctggggaaagggtaagagcaaaggctagctcggggcatagaggtgggtgtgaggaccttacccagggaggttgtaagtgtcaagttctccagcatcacatcgtggtacaggcatttctgagcctcatcaagaagaccccactccttccaggagaagtaaacagccacgtcctcaaaggtcacaatgccctgccaggatggggacacatgaaaccacaaacggttcctcctctcaggatccataatccttcccctcacacatttaccccatgctcatcctctttccaagctctccaagctccccagctcagaggagaaagcagtcagctggtgctgttgtctcctaatggggctcttggtcactggttgcagccatcagtaacaagaggcaggtgaacaaatacatgtatctaagctgtgggcgtggcataagggcaaccactccttcctgacaagcattcctctcatatgaccaaggtcatgtaagtctcaatcaggacactggggccatcaggcacactccctctccaagtgcatatcattcattacactgcacatacctcaggtctccagatcccactgccacatgaccatgaccaccactacgtcctataccacaggcaaatcctggcttccccacatgctacctgagtgaaagagtagataacctgggccgggtgcagtggctcatgcctgtaatcccagcactttgggaggccgaggtgggcggatcacgaggtcaagagatggagaccatcctggctaacagggtgaaaccccatctctactaaaaatacaaaagatcagccaggcgtggtggcacacggctgtagtaccagctactcaggaggctgaggcaggagaatcactagaacccaggaggtggagaggtggaggttgcaatgagccgagatcacgccactgcactccagcgtggtgacacagcgagactgcgtctcaaagaacaaaaaaaaagagtggataaccaacagccaaatataagacacgtgacattggacaaatgagatcaacagtttattaattttttttttttttttgagacgaaatcttgctctgtcgcccaggctggagtgcagtggggcaagctccacctcctgggttcatgccattctcctaccttagcctcccaagtagctgggactacaggcacccgccatcacgcctggctaattttttatatttttagtagagaaggggtttcaccgtgttagccaggatggtcttgatctcctgaccttgtgagctgcccgcctcggcctcccaaagtgctgggattacaggcgtgagccaccacgcctggctgaacagcttattaattaaagacaaatactcatagcctgtgaaagaataccacactccacacagggccatacggaggtagtactccagaaaagagtaacaaccaggtgctgtagaatgtaagttttgtagcatcaagatggagaagctccactggtccccagaggaggggactggcttgtttgaataactcaaaaaattgatagggaactgaaacccactacaaagtaataagcaggaactgttctggttccctggataagaatggataagaagggttcatttggctaagagagcttattcatgggagcaaagtgggaaggggaatttgttctcaggccatctaaggctgtatcgttttcatcagatgtcaaggcgacatatcatactgggccttaatttccggccttataccgcaacttggcaggcagcatccagagtgtggatataaacaggatccaaaatcccagacttcccacagcttacactagtggaagcagcctcaaaaatttctttgaaggcctccctgccaggctgtattccttgcctcagacatagccacacagaaccacaggtgaatcacagataaccatggccctattccacttctgtgctgcacttaccatccccttgagagtcatatatccacctaaagctcatttaaatcccagcctcactggtcgttcatctcacacacaatgactctcacaaatgaccacatgacactaacttaatcttccagcctgaatgaaacacccaggccccatcaagttatcacaaaatcctggatacccataaagtggtgaataagcacgagttttggcctgagtgtcctatgcgtttgcatccatctcatgtccattcttctcttgggagccgtggccactgccaaactacactgtcttttacataccttgccttcatgaccacttactctatcatcatcctcccagtcttggcccactaacagctttacaaccaaaacctggagcttgccccgcctaactgtgacccacagctcactaaccttggtgcgcacaacagccacatcttgaatatctgcaccctgaaccactccctagatttcaagaccggcacgttcatctgcccacttaacgcctccatttagtaggctctgaaagatctgactcttagcatggcataaacaaacctgatatccctagtgaatattactcctattgccaatttgttcatcttagttgatgaaacttctttccctacagctgctaataccaaaaaccctggagtcttctctgaaccctctgtttcactccctcaccacctacattatgtaatttagttgtcccttttgaaaccacacatccggaatctaaccacatctcctaaatcacgatcctgggccagtaaccctcacttggactagtctaccctgattttccttcctcctccctcaaccccccagtttgtgccccactgtgcacacagatgaagcctgtgaagaccttggtaaattacctcttttttctgattcaaacttgctattacctcctgaaaacacactcaacttctcaggcagccactgcagtcctgacgcctatcctcctgttctttgcttcccaccagaaagcaaggagacttgtggcttcataaatgcacccagctccgtactgcacctaagcatttgcacatcttgtacctttctggaaaaactttccacacccgttcacatggctgccagaaattggaacaactctatataccggctaacatggacataggaccctgggcttggggttcacccaaggtcttcagaactaagggctgggggaatggcactccacaacccagagaacctgtgggtgggagttagggctagtgagagactgggaaaccctccccttcctggcgtagatttcataaccctttacagccaagggaaacgtagaaagagccaggcctcagagaagagcatctatggcggtattagatgggctcaagccaccccgtagccccatgcctggccttggagccgggtgccctcgcaatggctgtgtcacctctgtgccccagggctcagtggcgcctctcatcaggggctccttgccagtcgcgccctcccttccctagcacaccaggtgttggaaacgggagcccctccggcgagcccccgtgtcctgtcctgggcagcagggccgcgagcaagcgccctcgggggtgctaggactagcgtggggagggcggggaaggcccagaggacgcggcacatacctgggccggggccgtcagctcggccgccgccatctgactctgtgagcggagcggggccagagaggatgtccttattccgggccgggcctgggtaccctgggcgccgccgagcctcagccacgcctctgtgcagcggggaagactcctctcgcgccttctcagtcagtcacggatgatgctgacccagcgctccggggctttctaccaagtaatcagtccagacaaatgccaaaacgaccgccacaaggaggacaacggaagtcccgccgcgaccgcgcgtgcgcttacggaaacaccacctttcggaggcctcattggctgaaggtcgccgtcgcccaacgcaggccattctgggtaatgttcccacaggcgcacggcgggagagtgagggtcgcctccacctccttccggaagtaaaggccaaacccctgtagggggcgctgggaaatggacactccaggttggggcggaggcgaggcttcgttctttcttaaaggagacgtacccaggtttctaccgattgctgtctgccagtgtttgtttggagacgtgtcatttcatgtgttcccagaggcacatatccagatgcacatattattacatacagtcagtcagtcacaaaatatatccactggttgagaaagcaaataaatatgactatgttgcggccgggcgcggtggctcacgcctgtaattccagcactttgggaggtcgaggcgggcggatcacgaggtcaggagatcgagaccatcctggctaactcagcgaaaccccgtctctaaaatacaaaaaataccacaaaaaaaaaaaaaaaaagaaaaattagctgggtgtggtggcgggcgcctgtagtccccagctactccggaggctgaggcaggaaaatagcttgaacccgggaggcagagcttgcagtgagccgagatcgcgccactgcactccagcctgggggaaagagcgagccactgtctcaaaaaaaaaaaaaaaaaaaaaaaaaaaaaaagactatgttgcaattcaaacgcatgcactcaagcactggagtcagttttctcagtctctgtatgtttgattagggacaagaaaaaaaacactccacacaggttcatgacaaagaggatgaaggtgggatgcggaggcaccctgcagcagcaggacataagtagatccctgtctctgggtccctctcgtgcctgtgtagtcaaacattgtgtccaattcactaagcaacacttgcatgaatctaatctcactttctccatgcctttatattcacttctttttaataatttgacatcaagctcagaaagagaacaacaaaaggaatggtattttgaaaaggcatgatggctagctagagcattaacaggtggaacaaagggtgctctgaatcccaaatgtagggtgtatcttaaattcaagatctcttctcaacgctgaaatgattatctttgcccccattagttacgctcttgttgcccaggctggagtgcaatggtgcgatctcggctcaccacaacctctgtctcccgggttcaagcgattctcctgcctcagcttcccaagtagctggaattacaggcgcccgccaccgtacccggctaatcttttttttttttttttttttttgtatttgtatttttagtagagacggagtttcgccatattggccaggctggtctcgaactcctgacctcaggtgatccacccacctcggcctcccaaagtgctgggattacaggcgtgagccactgtgcccggccctttgcccccattattatagggctgttctgcataaaaaattgatacgatatcagaaaaagaattgtaaaatacaaattacagaaagctactaataatgggtgtcgcttcgccagccagaaacctctgtggtcgcgcctctgcttgagttttgctcacacccgctgggcttgttccacccactcggcccagcaggctgcacctggatcccacacctaccaagggcgagccaggcgcggagccgcaaggggtgtgtgagcgagcaagtgaagggtccagccagtgcacacagccaggcacgctggctgctgcggcggggcgggcagctccaggcgctggcacaggcgccggctccttgcaagtctgcgactggaccagacatactgcaggcggcttctgctgcaggcaccagcatctagacgagggaaaaatggtggcgccggaaagctcggagacaccaagaacagcagaaccccaaagagggtgttgcagcatgtcacagccctggctccggagtctcgaggcctgggctcccggaagagccacagctcttctctccttcccgttgcttgcagcctggcaagcggggaggtgtgttttgggtggggtgtgttttcagcttgtttgtgatatagctctttcagtcccgctgccctgctctggctcgctgctgcttcccatcgtggggggcggccacccagtgctggctgagggcaggagggctatagtgttacagctctggctcggggaatcccaaagtctgggcctccagaagagtcgccatttttcactcatgcagcccagaagcatggctactcagccaggaatgtgttacagcccctttctctcctgctgttcgttaggtcccaagttcttgtcccccaagttcttatcccacgtccaggaagaatgaggttatgcagacaactggagggtgagcaaggcagagaagggttttattggacaacccaacagccctcaggaaacctgaagggagtagctcacacctgcatacagatagtctccgatgtctgagtctggctgagtctacaggttttttatgggctcagaatggagaaagtgtgtgctcattggtccatgggtggtaggaagtgcatgctgattggcccatgggcagtcatgggcgggcctgggaaaaacaccataccattggccgaaaggcgtcaaggaatttctctctctgggtcacagactccacctggaactggcagcgtggcctccaggcttcaggccattcgtggcttgaaggtggggtttcacagaaaacccaccccttcccacgtaggaacctgtctgcctttcatggccatcaacatgctgtccatgacgcccaggctgtccatgctgaaggttgcccgcaggcctgccccgagccactctcagccgcccccctcccaccacccggcctccttcccatgcttcttggtgcccaaagtttcagcctcaaaagcagtttctggaggaaatcgagatggtggggggctggcatgtcgtcactgccccgagggcacacacatttggctgggttgtgatagcgcccaggtttggctatcttgacatgtccacaactttgctctgccgtggagcaggtgctgagagtggggagaggccagggagtgggagcaggcacttctgggcctgtgggaaaagggtgcttcccaggtccccaagagtgcagggatgccctgtctggagccacgactaggtggctgcagctgcgcctgggagcacagggctcccgtcctgacaactcggtatggctcgaggctcccactgggatcacctgttcccagtccccgtgggctccacggagcatgcagccctggccgtgcctccccatttgcagccggcatcatcacagcggcccctccagatcagccactgctgccattataatgactatgtagtcattcaaaaatggtggcagaatcgtgtttgggaaatatcggatggtgaaaaaagtgaaggtctcacagaactcttttgttttggtttttgtttgttttttgagacggagtttcgctcaaaacggagtttttgagtccaaggatgtgaacttggactgggaggtgtgcaggaggggtgctgagtactaggtctgcgtgtcttgttctggtggctgtctcaagccatggtccacctggagtgtgggctagctgcatctcagtaatggcctggtggttgactaactgccttgaagtaatctctggaattttgcagataggtccctatgcctaccaagtctgtctcaagattatccccaggaacttctaagtaagcacataattagatactagcatacaattagacaaatgtgcatggtctaagggagtgtatggtgagaagcggtggacatggtatttcaaagaaagtacatttcaaggctgtattttaagactaatgagaagaaaagattctgcagtaaggttcaaggttatatcacaagactagggaaaaatgagaaaaaggaaaaaaactttttcaggccaggctgttcagttacaaaactagttttagagttgcagtgtgtcctgtcagcagccattaaataaaacttgtttcaagttacagcagggagtttcagcagccaggcttctggagaattacatttttggatcagggttatatgccctgagtgctttttttcccacagctctttcaactctgttttaggtgggtatgacaagaatgacccaattcatatgatcaactttcacacaattaatagggatcccttctaaatttgctaaatctgcaggatttttgagtttcgactggggggaaaacccaccaaatctcaaatcaatacatgtttattttcctaatacaaaacaaaatgttgttttctattatttatgtactatcataaagtaggatgtgaaaaatctttgtcagagacatggaggaaatttcaatgtgtattaataagcaaagaagccattctgaaaaggctacatagtgtgattccagctctatgactttcttttcttttcattcttttttttttttttttttttttttgagacagggtctcactctgtcacccaggctggagtgcagtggtgcagtcaaagctcagtacaacctcaaccacctgagctcaagcgatccttccatctcagcctccagagtagctgggactacaggtgcacactatgcctggctaagttttgtattttttttgtagagatgggggtctatgttgcccaggctggtctcaaactcctgagttcaagtgatctgcccacctcagcctcccaaagtgctgggattacaggtgtgagccactgtgcctgaccaagcaggtgtattagttttctactcttgtgtaataagttaccgcaaagctattggtttaaaacaatacccacttattatctcacaattgcctaaagatagcttagccgagtatcttggtcttctgagagcctgactctcacaaggctataatcaaggtgttgaccaagcctgcaatttcttccaaggctcggagccttctttcaaactcacatagttgttggcaaaattcagtgtcttgttgcaagaataaggttcctgcttttttttttttttttttttgagatggagttttgctcttgttgcccaggctggagtgcaatggggcgatctctgctcactgcaacctccgcctcctgggttcaagacattctcctgcttcagcctcctgagtagctgggattacaggcatgcaccaccaagcctggctaatttttgtgtttttaatagagatggggttcctcagtgttggtcaggctggtctcaaactcctgacctcgtgatccgcccgcctcagccttccaaagtgctgggatcacaggcgtgagccactgtgcccggccgtcttgttttattttaatggctgatctatgtaatcacggaggccagtatgtacagacaagaaagggggagcttttattgcttctctcttcctccttggacaaagtcttgatatcacctccttcttggcctgagtgtactcttcagccacttgtgtgcttgcttgttctcagacctgtgggcctcagcctgggcagccaggagcttcttttgggccttttctgccttcagctcgtggacgtgctccatgaggatgtgctccatgagaatctgcttgttttgaacacatttgctttcaccttcaggtacaagctgggatacatttggtggtcaatcttcttaacttcatgggatcttctgagcagcccgtgcagaatcctcattctcctcatccaagttaccttctctggcattcaggcattggccataccctttagcttacctatgtccatgtactcacccttccagcaggccaaggcatttttccagcatcgagcccggaaatggacagtcacaggcttgtggatgttcagcctatctttgatcagcttctggatctgctgatgggaggtggcattggtgatttcactggtctccttggagtgcaattagaccttctccttgccacagcaaaggacatgagaggtgagcctcttctgaagcctgcgcatactcatggcttcggctgcagcagcagctaaaggaaagagctctgaggttcccagtttcttgtcggctgttgctgggggccatctcaactgctaggggcccgtggcgtggccctctcacagcaggaggatctcgctcccgtgtgctgaggcagtcttatagaacagtgaagggggggagtatcttattgccttggcctaatcacaagagtgacgtctgtcagattcacagcccccactcaatggaaggaaattaggcaactgagtgcactgaggggtgagaatcttggggccatcttataattctgcctcccattgcagtttttgctaatagacatctgcccacgaagatccatgttcttcccttccttgttcacttgatatttgctacaaagcagcccagtctgtccacgctggaggctaggtatggcatggcatgttcccagcagaactagaactggagcatgaaccatgctggctaccactgcctggaggaccatgcacagtctatagtccctggtggattccagagccaccaaggcatgcaggaggctcctccctgtcttccctctctctgggctgctcatctggaactcctgagctcaggtgatccgcccacctctgcctcccaaagtgctgggattacaggcatgagccaccatgcccagcctgggcacctcatctgatttaggaccctggaatagaattgctctgagaattatcaatgaaggaatagattttacccctgcatctgctggttccattgcccctcatccggctcccaggaaagctttgaattgtgggcaaaaccaggtggcactggcagagacattcttggggttggtgtctcccctaaaacacactgtgccttctagagaggttccctagaagtcgcgatctttgctgagaaatatccacacatgctttgccacattgtcaatcataggaacatgctgcccaacaaatatttgtggcatagtaaaatgtttttaaaagcagttgctatggattgaacgtatccccccccaactccccgccatcaattcatgtgtcctgatgtgatggtatttagaaacaggccttctggaggtgattaggtcatgaggatagagccctcatgcatgggattagtgcccttacaagacgagacagaaaagagcttcctctctctctcaggaataatggtgctcaggagaacccagccatactggcaccctgatcctagacttacaactcccagaactgtcggaaatacatgtttgttgtttaggccacacaatctgtggcagacaagctaactaaaactgcagtcttgcaggctagtgtctccctagttaggatttgatctcagagcctcaagggctgggcatggctcttgcctcaaggattgaagttgcagggagggacatggaggcctgtccaggacctgggagttgtgccttggtacagtgccctggccgctctgtcctgtgcccccggggctgcccatcccatgtgtgattcctactggctgcactgtgcaggcaggaccaagctgtcggcttgagaaatgctttgcactgtcccaatttctaatatacacactgacttttgccttctcacattgtctgttctaatttttaaaatttaatttaggaaagatggaaactgaaaggaagggttagaagacctgagtctgagttcagttcatcctcaacatagactaatttttttgtggttttttttttgtttttttttttgagacggagtctcactctgtcaccaggctggagtgcagtggctcgatctcggctcactgtaatctctgcctcccgggttcaagcgattctcctgcctcagcctcctgagtagctgggactacaggtgcccaccaccacgcccagctaattttttgtatttttagtagcgacagggtttcaccatgttggccaggatggtctcgatttcctgacctcgtgatccaccctcttcagcctcccaaagtgctgggattacaagcgtgagttaccatgcccggcccaggctaatgttttttttttaacagcttgactgagatttatttcatttagtgcaaagttcactcttttaaagtatgcagttcaggccaggagtggtggctcacatctgtaatcccagcactttgggaggctgaggtgggcagatcacttgaggtcaggagttcaagaccagactggccaatgtggtgaaaccctgtctccactaaaaatataaaaattagctgggcctggtggtggatgcctgtaatcccagctacttgggaggctgaggcaggagaattgcttgaacctggaaggcagagggccaggcatcgtggctcacgcctgtaatcccagcactttgggaggctgaggtgggaggatcatgaggtcaggagatcgagaccatcctggcgaacacgatgaaaccccatctctactaaaaatacaaaagaattagccaggcatggtggcaggcgccagtagtcccagctactcaggaggctgaggcaggagaatggtgtgaacccgggaggcggagcttgcagtgagctgagatcgcgccactgcactccagcctgggcaacagagcgagactccgtctcaaaaaaaaccaaaaaaacagaacctggaaggcagaggttgcagtgagtcgagatcgtgccactgcactccagcctgggtgacagagtgagggagactctgtctcaaaaaaataaaaaataataaaatatgcaatttagtgctttttgtatattcacaaagtttacaaccatcaccactatcaaattttctaacattttcttttttcttttcttcttttttttttttttttttttaagaccgagtctggctctgttgcccaggctggagggcagtggcacaatcttggctcactgcaacctccacctcctgggctcaagtcatcctctctcacctcagcctcccaagtagctgagactacaggctcatgccactatgccccactaatttttgtactttttgtgagacggggttttgccatgttgcccaggctgttctcaaactcctgagctcaagtgattcacctgcctcagcctcctaaagtgctgggattacaggcatgagccactgtgcccagcctctaacattttcattccccataaagaaacctcgtacccacaagcagtcttccccctcctgctgccccagctcctggaaccaccaatctactttctgcatctatacagtttcctattctggccatttttaaagaacagaatcacacaatatgtgtctggcttcttgctcttagcataatgtttttcagtttgtttatattgtagtgtgcgtaagaacttcactcttttttctttttcttttctttttcttttttttttttttttgagacagcctcggtctgtagcccaggctggagtgcagtggtgcgatctcgactcactgcaaactccgcctcccgggttcacgccattctcctgcctcagtctcatgagtagctgggatcacaggcatccgccaccacgcccagctaaatttttgtatttttagtagagacggggtttcaccatgttggccaggatggcctcgatcccctgacctcatgatctgcccccttggcctcccagagtgacttcattcttttttgttgctgaaaaatatttaattgtacagatagaccacattttgtttatccatttgttggttaatggacatttgggttgtttccaccttctggctcttatgaatggtgctgctaagaacattagtgtgcaggtttttgtgtgtacatgtgttttcagttctcttgcatgtacacctaggagtggacttgctgggtcatacagtaactctatgtttaactttctgaggaaccgtcagattgttttccaaaacagccgcaccgtttcactcactcttgcctctttgcattcccacagcccttggtgtccacttgctacctctggccgtgtttcttagctccttgcctgtgggcctgtttccctcaagagagctggaacctgacggcgatgagtgtgtatttcttttttgtgtggagacggggactcactatgttgtccaggctgctcttgaactcctggactcaagcaatctgcctgcctcatgctcccaaagtgttggaattacaggcatgagccatcatgactggcctggatgagtgtgttttacttattttatttaattattttatttatttattttatttaattaattaatttttgagacaggatcttgctctgtcaaccaggctggagtgcggtggcgcgatctcggctcactgcaaactccgcctcccggattcaagcgattctcctgcctcagcctcctgagtagctgggattacaggcgcatgccaccatgcctgactaatgatgagtgtgttttaatccggagtcatatttattttaacatcctcagtttcctcatgtgtacaaaggaaacaaggtatggagctgacaggtaatctcaccaggaaagttttgcttcatgaaagctattccctggctagtctgggagatggccccccaaaactacttgtgcggtatttctggtcaggagcaagagaagaaaatcctgacaagttctcttaacccttaacaaagttggattctattctattttccaattaagttataattattcatcaactatgagagccaataagcaagagttgctatatcatgtggctttattttctgggatacaggtctggcatttctttctttgatgtcctcttccataaggttctctgggagcaagccacgcccacaggctcagtctcccagcacccccatagtttctcctctgcctcagccggcacctctgtcgtctgcgttcacaagtcttccatttttccattatgtgacgcattctttgttttgttttctgttactgagttttgctcttccttcagtttcttcttaatatttttgcttctttttgatataataactaaaatgtagaaatgatgttattgagatagtaataagtgaggaataaaaatggagacaaaaggggtgagggaaaaagcctggaaaaatagaggtaccaacagtggaattttcagaggattcataatgaatgttatttgtctgacaaggatggtgaaaattaaattttaaaattattttcccatattttgtattcaagttgtataaatgcccagtaaaagaagaagaagaatgtagaaaatttataatccaatgtggtaaagagacattgggaaaatgttttctacaggttatgacaaagtcctctgcctcagtgagcatcagtgatctctcctgctgtggctgttctgcctctttctggctatgtctggagtttttagagagtgagtccatgtgaggatggttagtatgtctgaatcacacactacactctctatagttttctctctagaattttttaaacaggtacccacgaatctcagaacttctaggctgggctcagtggctcacacctataatcccagcactttgggaggccaagacgggaagatctcttaagcccaggagtttgtgaccaacctgggcaacatggtgaaaactgtctctactaaaaatacaaaaactagcccggcgcagtggctcatgcctgtaatcccaggactttgggaggctgaacagggcggatcacttgaagtcaagagttcgagaccagcctggccaacatggtgagaccccccatctctactaaaaatacaaaaataagacaggcgtggtggcatgtgcctgtaatcccagctactcgggaggctgaagcatgagaatcacttgaacccaggaggcggaggttacagtgaaccaagatcacaccactgcactccagcctgggcaacagagcgagactccatctcaaaaagaaaccacaaacaaaaatgagcccggcatagtgacatgcaccgtagtcccagcaactcaggaggctgaggtgggaggattaactgagcccaggaggttggggcttcagtgagctgatattgcaccactgcactccagcctgggtgacgtagtgaaactctgcctcaaaaaaaaaaaaaaaaagaaaaaagaaaaaaaaggccaggagcggtggctcacacctgtactcctagcactttgggaggccgaggcgggtggatcaattgaggtcaggagttcgagaccagcctggctaactggtgaaactccgtctctactaaaaatacaaaaattagccaggggtcatggtgcacgcctgtaatcccagctactcgggaggctgaggcaggagaattgcttgaacccaggaggcaaaggttgcagtgagccaagatttcgccactgcactacagcctgggtgacatagggagactctgtctcaaaaaaaaaagataaataaataaaataaattctacaggcggggtgcattggcttatgcctgtaatcccagcactttgggaggctgaggtgggtggattacaaggtcaggagatcgagaccatcctggctaacacggtgaaaccccgtctctactaaaaatacaaaaagttagctgggtgtggtggcgggtgcctatagtcccagctactcgggaggctgaggcaggagaatggcgtgaacccgggaggcagagcttgcagcgagctgagatcatgccactgcactccagcctgggcaacagagcaagactccgcctcaaaaaaaaaaaaaaaaaaaagaacttctacaaaatcagttttaaataatcaatttcatcctcttctcacaaggacagcagaacatgtctgtggtgggcatggcatgctgggaaattttaccctggggtagtgacctctattttgtgggtctggatcccattttcacgtcagatggagacagatggtgcaggtgaaacatctgcgtgtctgtgttctgaatgcaggataacatcacggtaatgagtatgtttaacggaaacatgttttgtgctgggaaaagtttgtttcctgaactctgttagatccgtggaattgccctgcaaaaggaactgagcaaccccacagctgttcacccctctgtaagatttgatgagaaaggttcatttccgtaagtgtggctgtgaatatttgtctctcttacttcaaactcccttaactcccacttatctttgcctttgaaaaccaagccacaggccaggcgcggtggctcacgcctgtaatcccagcactttgggaggccgaggcgggcggatcacgaggtcaggagatcgagaccatcctggcacccgagcgttggtggtatagtggtgagcatagctgccttccgagaccatcctggctaaaatggtgaaaccccgtctctactaaaaatacaaaaaattagccgggcatggtggcgggcgcctgtactcccagctactcgggaggctgaggcaggagaatggcgtgaatctgggaggcggagcttgcagtgagcagagatcgcgccactgcactccagcctgggctacagagtaagagtccgtcttaaaaaaaaaatgaaagaaagaaaggaaggaagaaagaaagaaaggaaagaaagaaagaaaagaaatgcaagccaccgctgagaaagaaagaaaagaaacgcaagctgccgctgccagcttggctttcctgcgaatagctcttacaggtcacactacctgagtggatgaacttttccagctcattttcgttctctggaagtaggtgcgtggactcaccctcgtcctctgagccctcttcttcatctcctaataacggtatcctgaggttcttataaagtgactcgagctgttgtctttcctcagcctgtgccagtcgactggagaatgatataaatgaatttagaagcacagttttcatgatgaataattcatttctcaaccatgccactttttgacaggaaaggagtcgcttgtggagtgggtgcagacataagactttgaaaccagactaatcatggtcagctctcaactgtctacatggtcaggccatttcctggagtaaggagtaactccgatcatcccaaagcatggatcaaagccaggactagacgtgaacaaggcactcacattgggttccaaacttaaggtgttgacaaaaaatccataatcaaacaaatcatctttctttccattcctttctcttctctttttctttctcttttttttcctttttctttcttctttcctctctttccttcctccctcccttcttttctttcctttttctttccctttctctctctctctccctttctctttccctttctctctctgtatctctccctttctctttctctctctctttctctctttggaacagggtctcattctgtcacccaggctagaagtgaactgatacaatcatggttcactgcagctgccaactcctgggttcaaacagtcttacctgctcagcctcctaagtagctgggaccacaggctcgtggcaccatgcccggctaattatttttgtatttttttttttagaaattgcgtcttgctatgttgcccaggatggtctcaaactcctaggctcaagctgtctttcctccttggcctcccaaaacactggaattacaggtgtgagccactgtgcccggccataatcatgtttcagtgtaatattttacaaaataaaaattaatgtcaagaaatccgtgatgaacaaaataggacagaatgggtgttactgatttttctacctcactgtaggtccaatcctggaagtggatcactgaacagctatttctgtttggtgtggaaatggatgacagtgttttcctaacatacttaccttcccagtactgtgtgaattatatattaaaaaaatacttttaggggccaggcgcggtggctcacgccagtaatcccagcactttggtaggccgaggcgggcagattacctgaggtcaggagttggaggccagcctgaccaacatggagaaaccccgtctgtactaaaaaaatacaaaattagcagggcgtggtggcacatgcttgtaatcccagctacttgggaggctgaggcaggagaatcacttgaacctgggaggcggaggttgcaatgagctgagatggtgccattgcactccagcctggccaacaagagtgaaactccatctcaaaaaaaaaaacaaaaaacttttagggttagtttattttttgtttttcttgctcaaaaggctgggacaggagcaagatttgagtgacaaaagggaggtgctcgcctcagtgcgaaatgtaaggaggtaccccaaacagtgaaaaatgaagatgagtattttaactcaatttttttttttttttttgcagatggagtttcactctttttgcccaggctggagtgcaatggcgcgatcttggctcaccacaacctccacctcccaggttcaagtgattctcctgtctcagcctcccgagtagctgggattacaggcatgtgccaccatgcctggctaatttttttgtatttttagtacagatggggtttctccatgttggtcaggctggtctcgaactcccaacctcaggtgacccgcccacctcggcctcccaaagtgctgggattacaggcgtgagccaccgcgcccggtccttaactcagtatttttaaaaattgaaatgaagcaaaaaaaacaaaatccaggatataccaaatatcaagattgtaaacagagataggatccaaacagtgctgtgctaaaccacaggggagcttgagtcaaaaggaaaggtgtgagtccctatacacgttttaatgtatttttaaatgcttattcttttccaaaacacttaagaagttcagaatatatttaataattgaaaactggtgtatgaaaagtcacaacattaagtttaaatattttatctaggccaagcacagtggctcacgcctgtaatcccagcactttgggagtccgaggcgggcggatcacgaggtcaggagattgagaccatcctgggtaacatggtgaaaccccgtctctaataaaaatacaaaaaaaaattagccgggcgtggtggcgggtgcctgtagtcccagctacttgggaggctgaggcaggagaatggcgtgaacctgggaggcggggcttgcagtgagctgagatgacgccactgcactccagcctgggcaacagagcaagactccgtctctaaaaaaataaaaataaaaataaatattttatctctaccctaaacaaaattaattgtaattttactttcctggtttaaataaaagcaaacttaccaatagtattttcaaaatctacttctggaaaaaatgaaccactaaaaattacataaaacttgtacttttgaacaggtggttttgttttttttgtttgttttcgttttggttttggttttggccccaggctccactatagcttagtgctaatacaaatgtgaaaacaataagaattgactagctcagcaactcaattcaacactgagtgtccaggagatatgttttactgagttgcattacaaaactttatatttattaatagttttgttataataatgaaatatacagaagctacagttacataatttttgtttttgagacatggtctcactctgtcgcccaggaggaagtgcagtggtgcaatctcagctcactacaacttccacctccagggctcaagccatcctcccacctcagcctcttgagtagctgggactacaggtgcgtgctaccacacctggctaatttttgtattttttgtatagacgcggtttcaccatgttgcccacgctggtctcaaacacctgagcttaagggatccacccgcctcggcctcccaaagtgttgggatcacaagtgtgagccaatgcccccggcctatacatttacataaattaagcggatgtagtggagataacccacaaccaagcacgcaggttacgctctcattagcaaaattccccttttacctttaatgtcactttgccttcatgtgacctactccaaggtggtcttaacatagctgcctcagaaaatatctcacacatggcaatatatcttgttttcacacttaattcaacgaagcaagcaattttgtacttctcaagctgtttctggtgggatacaatggaatcctagcacggaatcatacagtaggagtcagaatctgttggtttggtcagaaccgcatgagatcacagtgtgtctcacctttttctaccgtgaatttcaaaatgattacatcactcaaaacagcttgaccccaagctttatttgcgaagacggtgatgtaacttcccccaaagctgctatcaccccagactgcactgacacatttctagtgaaagggagagtggtcgctcttttctgctgtgcactattgagattccttccagagtagcaagttctttttattttatttatttatttatttatttatttattatttgcgacagagttttgctcttgtcgcccaggctgaattgcaatggcgtgatctctgcccactgcaacctctgcctcccaggttcaagcaattttcctgccccagcctcccaagtagctgggattacaggtgcccaccactacgcccagctaatttttgtatttttagcagagacggggtttcactatattggccaggctagtcttgaactcctgacctcaggtgatgtacccgcctcagcctcccagagtgctgggattacaggcatgagccaccacacccggcctcaagtttattttaaaataccaaattctggggtctgggaatggtggctcacacctttaatcccagcactgggaggccaaggtaggcggatcacctgaggtctggagttcgagaccagcctgaccaacatggagaaaccccatcactactaaaaatacaaaattagcctggcatggtggcgtatgcctgcagtaatcccagctacttgggaggctgaggcaggagaattgcttgaacccaggaggcagaggttgcagtgaaccaagatccataccattacactctagcctgggcaacaagagcgaaactccgtcccctcccctccaaaaaaagtagaaaaaataaaataaaataaaatactgaattttgggaggatgctagcatctcaaactgtgtctttcaagcatttttgatcatgactcccagtaagaaatatattttatttcacaaccgtgtgtctgtgtgtgtgtgcatgtctcacatgtatctgaaaagtttaaaaatcagccttttacattaatactttaagtaatattttcttttctttttctttttttttttttcagacgagtctcactctgtcactcaggctggagtgcagtggcacgatctcggctcactgcaagctccgcctcccgggttcacaccattctcctgcctcagcctcccgaggagccgggactacaggcacccgccaccacgcccggctaattttttgtatttttagtagatacggggtttcaccgtgttagccaggatggtctcgatctcctgacctcatgatccacccgcctcggccttccaaagtgctgggattacaagcgtgagccaccatgcccggcgtaatattttctaatattttctattctgctgaattgtattctgtcctgtgtctttctttctttttttttcatgtgtatcatgcctcaacatgagtacaatccacatgttgaaaaacactaatctggaaatttataatgaccaatactttagcaattataagatgtatcatcatcatcctttgacattaaataataatcagttgacttgttatgtctcatttaaggacagcagatattacttagcagatacttactatatcatataggagattgccatcccacatatcagggcaatgctgaaggctacgctcgaaattaaaattactttaacaagagcaggtctatgccgaattattgctaaaaagaaagaaaagaaaagaagtgctcaaaaatgttcattttagctatgtctttcagttaatatatttgtccttacagaggggaatggaagtcaaaaccagaaacactttcaaaaatagcttgttttgtttttttttgttttgttttcttttttgacactgagtctcgctctatcacccaggctggagtgcagtgcatgatcacagctcaccgcaactttcgcctcccgggtccgagcaattctcctgcctcagcctcccaagtagctggcactacaggcatgcgccaccacacctgcctaatttttttgtgtttttgtagagatgggattttgccacgttgctcaggctaggactcttaattttagaaaatactgaagttagattttcagtgagccgagatcatgccactgcactccagcctgggcaacagtgtgaaactccgtctcaaaaaaaaaaaaaagaaagaaaactgaaacagaccattggggattgggcatccaagaggtcactagagacctgggcagaggccatattagctgtgtggtggggacacaactgaagcagtttcaggagggagtgagaagaaagtaactgtagaccatgaattttgaaaattattttggggaactttgtataaaagaaagaagagaaatgggcacagctcctggaggagtctaagggatcgagagatggattttgttttttaacatgtgaacactggcagcatgttcgtgaatgggaatgaaagagtgaatcgtgatactacggtgccagttcattctggctgctgtaacaaaacaccacaggtttggtggcttagaaacaacagacacagccaggtgtggtggcccactcttgtaatcccagcactttgggaggccgaggtgggcagatcacgtgagctcaggagttcaagaccagcctgggcaacattgtgaaaccccaactctacaaaaatacaaaaattcatcgggtgcggtggcaggtgcctgtaatcccagctactcaggaggctgaggcaggagaattgcttgagccagggagtgggaggttgtagggaggtgagattgcgccattacactccagcctgggtgacgggaatgaaaccctgtcttaaaaaaaaaaaactttgggaggcaaggcaggtggatcaggatgtcaggagttcaagaccagcctgaccaacacggcgaaaccccatctctaataaaaatacaaaataaaattagctgggcatggtggcacacgcctgtaatcccagctactcaggaggctgaggcaggagaatcacttgaacccaggaggtggaggttgcagtgagccgagatcgtgccactgcactccagcctgggcaacagagcgagaccctgtctcaaaaaaagaaaaagaaaaagaaacaaagaaacaacagacattggtttctcacagttctggaggctgggaagtcccagatcaaggcatcagcagctttggtggctggcgagggttcactttctggttcaacagagggtgccttctttgttgtgtcctcacagggtggaaggagtgagacagctctctgtgacttctactgtaagggtgctattcccagtcatgggggttccaccctcaagaccgcatcacctcctaaaggccccaactcctaatatcctcacctttggggttaggatttcaatacttgaatatggggttgggggacaccagcattcagaccagagcatgcaggaaagggagagggaattgtcaggaaagtccttgagttggcctaagaggatggaagctgggacacaggccagccttggcatggacggttcaatttccagcaagagacagagaaaggaggtgtgattgctggtagacaggagggtgtggatactgtcttttaactgcttgtattttgtttgtgaaggaggcaaacaaggtcattctgggagagcaaggctggggtagaatacattgagatatttacagagctagagaaatatatgagaaagtcaccaagcaggatgggagaaatagactaggaaaatgaatagcatatttttaataaaatttactagaaatggaattgctgggtgtatttattatattttcttattttccgtattcctgatgctctggcatttggggccttaatcctggagacctcccttcccagggctagctatttcctagagacagcgaataactcccctacaagcacatctttgaaatacaaaccaaccaatccacagcccacaccccaaccatctccttttcaaactcacacaataagccaatctctccctgcctgccctaaatcaccccagggccaaatactggacaactagaaaccatccctatgatttaccaaaactattcaaatctatatttgctcagagtacctgccatgcctcacccattccttccctcagaaaccccagtagaggcggggaccttgctcaccctcactccctgtgcttcctgaggttactggtgtacccgtgtgtggtgggccatgtctcctgtttccaggaatctataagtataaactttttccttcatgaagatcatttgcatgtctgggagtcttgccataactgattaaaataaatcccccaggtatatttcaacactctaggttaaaaagtaattgccagccggttgcggtggctcatgcctgtagtcccagcactttgggaggccgaggtgtgcggatcacaaggtcaggagttcaagaccagcctggccaacatggtgaaaccccatctccactaaaaatgcaaaaattagccgggtgtggtggtgcacacctgcaatcccagctgcttgggaggctgaggcaggagaatcacttgagcccaggaggtggaggttgcagtgagccgcgatggcgccattgcactccagcctgggtgacagagtgagactctgtcttaaaaaaaaacagaaaaaaaaaaaaaaaaaaaaaaaaaaaaaaccaagaaaaaaaacaaagtaagcaccttggccaggcatggtggctcatgtctgtaatcccagcactttgggaggccgagccgggtggatcacctgaggtcaggagtttgagaccagcctgaccaacatggtgaaaccccatctctgctaaaaacacaaaattagcggggcatggtaatgggtgcctgtaatcccagctactcaggaggctgaggcaggagagctgagatcgcatcattacactccaggctgggcgacaagatacaagattgaaactccatctcaaaaaaaaaaaaaaaaagtaatagcattgtttttatgagaactgtcaattgccctctctagaagttgtgctcactgctagcctacaaacaagacatgagattatgtttcccagctcctttgccaatacagttatgagacattttgcccactttcaacaggatagctgaaaactggaattacagtgtagttttatgaaattaaattattcaaacttaaactaatttaaacttaaagctgttggaactttgaactactctgaacctgagagcaatgtggctatgcagcctgaatcacaaggatgcagtggcaacttctgccttttttcctgtaaataagaagatcaagaggtgccagctgtgagagccccctcagatggcttcccctcctcacagagcaataatcttccttggaacgttgccgtctataaccaatcaaatagctgtaacttatgcactcgtctcatatggaaaatgttacaatcctgctacaatgtcagtctctgcacatataagtgaaaccataacttctcctctttggaaatgctgtccccattagtttggagtcagtgtctcgtgggtggacatcctcaagctttgtgctcaaataaactctgtacttaatcatatttgtcgaacttcattatttaagcttggcagtttcaatgcacaattcttactatgagtaaggtagacatctttccatataatttttttttttttgttacagagtctcgctctgttgccaggctggagtgcagtggtgcgatctctgctcacttcaacctcagcctcccgggttctcctacctcagcctcccgagtagctggcctccaccatgcccagctaatttttgtatttttagtagagatggggtttcaccatgttgtccaggctggtctcaaactcctgacctcaggtgatctacccacctcagccccccaaagtgttgggattacaggcatgagcctgtactgcacccggaccatcaactttattagataaacaattttgtcccgtctctatcctacctacaactgggacctgaagctcaggggtggcagaggtctcagtgaccttctagcaccagcacacaaaacgagctagtgtcaaaagaaggaccagtgtgcaggcctttgataccccagccaggactcaagctctgtgctttggtgatggtggtgtcaatgggcaggtgaaacagtcatagctgagctttaggaagattgataatgtgtttggcgtggatggatgtattcatcacgttttttattttctgtatttcctgatactttgacatcttggggccttaactgacccttgaagagactgccctcccaggtccagccaattcctgaagatagtaaaccctggcctgcaagtgcacctttcatgtgcaagccgacacacccaaagcctacaccccaacaatctctatggagccctcatgctccaggccaccatcccctgcccccaaccaccccagggccaggtcccagacaaccagggacataccccatgccccacagccaccaaatcactcaagctgatcccaagcccgccttccctacctgccttcctgtaaaaaccagaataaagttgttttttttaaaaaagacagcctcgctctgttgcccaggctagagtgcagcgacccaatctcagctcactgcaacctccacctcccaggttcatgcgattctcccgcctcagcctcccaaatagctgggattacaggtgcccaccaccactcctggctaatttttgtatttttagtagagatggggtttcaccatgttagccaagctggtctcgaactcgtgacctcaagtgattcatccacctcggccttcctaagtgctgggattacagggatgagccaccgcacccggcccagaataaaggcttttgctcacactttcctggctccctttgccttctgatagaccctggtgcttccttgtgtggactcctgcttctagggacccgtgagtatcaggcttcttccttcatgacagtcatttctgtgtctgcatgtctcactcagcatatgtgattaaataaaatgctggctacatgtgaaagcagtggagatgggtaggtggtgggggagctgactcagaagccgccctgttgcaggcacttagcaaatgtgcagaggagaaggaaggatgctctggggcgggagcagcagcaggacacaaggtgccttctgctttggaggactctgaagcgagaggtgttgaggaggttccaggacaagccacagtggggagagttgctagaaaggctgctgacagggccgctgtgtgtgcccatgcattttgtgtgttccacaaagagatctcagacacagcctgtgctctactcactacaacatcagcccgtggagttgagccaccttctcacctgccccaagcggtgtcactgcgcatccccctccagagggggcaccttgtctaacacacatgaaggcaccacgtgtgcaggctccttggtgaccagccagcaccctctggagccacacatcacgacagcttcaggaatgttgcgggtccacccgccctcccagatcccttggcttacctttattcctcaggaatttcatggggttcgtaggggatgcagctaaaaggccatcaaaggggatcaaaaagaagagactttaagatggtttaagatgaacttgggaaaacaaggaaataacttagcattagagaaggacgccgaacacacagcttccaaatatctaagatgggatgtgttaatacattcctcccaatgcctggcagcaatgtgtgggttaatttgcagaagcctggtgagcctgctgttctttttgcacctggtgcttcctgtcatgaagaatgacctttaggaacaggatacttttggtttctggtctccttttgcagtcatacaagttgggaaatctctgcccaaattaaggacctggagagacttagagttgaaggggctacgacctcattagaaggtcagcaagggttgggcacagtggctcatgcctgtaatcccagcgaggaaggcagatcacgaggtcaggagttcgagaccagcctgaccaacatggtgaaaccccgtctctactgaaaatacaaaaattagctgggcatggtggcacgcgcctgtagtcccagctactcaggaggctgaggcaggagaattgcttgaacccggcggtggaggttgtggtgagccgagattgcgccactgcactccagctgggtgacagagtgagactccgtctcaaaaaaaaaaaaaaaaaaaaaaaaaaaaaaaaaaaaaaaaggatcagagagccaggcagagaggccagggaaccaacaatagtgtcctttcctcggacacaaattacatgcaaatgtatcacacagacagcatttcccttgcatggaatggagattatttacaagcatcatatatctccacaaagggttgctgagcttcaaagattgtcggggttggttttgctgttataagataaacaaacatcctctagtactcaaattagaagggaaccatagaaaatgcttataaagaattctcggctgggcatggtggctcatgcctgtaatcccagcactttgagaggccgaggcgggcggatcatgaggtcaggagatcaagaccatcctggctaacacagtgaaaccctgtctctactaaaaatacaaaaaattagcttggcgtggtggcgggtgcctgtagtcccagctacttgggaggctgaggcaggagaatggtgtgaacccaggaggtggagcttgcagtgagccgagatcgcgccactgcactccagcctgggcgacagagcaagactctgtctcaaaaaaaaaaaaaagaaaaaaaagaattctgtacactcacaaaccttctgtgtctagacttgcatgctctactgccaaatgtgcaccaaattcaagtcagacaggcatacctgtgtaatctggatgggatcaaggtttttgtgtgcgcttattaaagtgaaatgaaaaagagaagaaagtggcaatccctaaagagaaagcagttaacagagagtgaagagcataagatctaatttccaagcaaatgtttatctaattatactctattttatggacctttctaccagcaagcacacagtacacattcacatggcagataagaggactccaggctacgattctcactccactgaatgaggaattcaatgactcacccgtggatctcgaggcagccccttgaatcccaggcaactgggttttatgaaagaacactttgggctctttggtgatgtttctgggtggttgtgaccgtttactgccttgaaaagaaaactttttgcggtgaaatgtaattaccttctttttatctcccctgaaacagcttttcaattctccctgagtcacataaaaccagtggttgaagctacctggtaagcctgttatgtttccagtgggatggagtccatctgcatacggcaagcataaatgaagttggcattccattaaaaacaaaaacaaaatgaggaaaccactctgaaccttgtccatcactctcaaattatcagtattttatcccgtagatgaaaggaaatacttagctacagtccagcatctgtcctctatttatctgaggaatcaagaagttctactcccttcagaatgtttgggcagtgacttggagccaccagtgtgaggtcagtccttgctgtgataatggagttccttcatggaaccatgctgaccaatggggagactacagtgtaagagggcagtgcttggaggtgcaggcatgatgagaccaggtccctgcctgcagtgtgcagattagtgaggaggcagaaagaaatcaattacagtcagccctccgcatgcatagttccccatccgtgatttccaacaacctcacttggaaaatgttcaggaaaaaaggaatgggcacggtggctcacgcctatgatcccaacactttaggaggtcaaggtgggcagatcgcttgaggccaggagttcaagaccagcctggccaacacagtgaaagcccatctctactaaaaatacaaaaatttgctgggcgtggtggtgcacacctgtagttcaagctacttgggaggctgaggcatgagaatcacttgaacccaggaggtggaggttgcagtgagctgagatcatgccactgcactccagcctgggcgacagagcaagactctgtctcaaaaaaataaaacaacaaacacaaaaacaaaaactagccaggcatggtggcgtgtacctgtagtcccagatactcgggaggctgaggcaggaagatcacttgagcccagaaggcagaggtagcagtgagccaaaatcgtaccactgcacaaagaaagaaagaaaagaaagtggaaggaaagcagtcacccttagaagggaggcaatgtgcacaggggagacccacagcaggaaggtaaagggggactcctgatgactgaaagtgggccctaggcttcagagatgggaggaatagaagacgggctcaaaaaaggcaatgaactatgtcatgtatgagggagacagaggggacctgggagtgctggatgttagggaccactgaaatcaatactgtccaggctgtgcatgataggtgagaggaagggaatacttccaggaagaagcagaagtctgggactttcttttgactcgtgatgtgacctgaccaacaggaggcccttttttttttttttttttttttttgagatggagtcttgccctgtcacccacactggagtgcagtggcacaatcttggctcactgcaacctccacctcctgggttcaaacgattctcctgcctcagcctctggaaccgctgggattacaggcatctgccaccacacccagctaatttttgtatttttagtagagatgggctttcaccatgttggcggccaggccagtctcgaactcctgatctcatgattcacccaccttggcctcccaaagtgctggggtgacaggagtgagccactgtgccctgccaggaggccctttaagacattaaaaaaactcttatctgtttaaacagagatgggatcttgctacgttgcaaggctggccttgaactcctcagctcaagcaatcctcctgtccctcccaaaatgctggcatgagcctcggtgcccggcctagaaattttttcaagataataatcttagtaataaggttataagttaccaggatgcttgtggtatattgcatatgacttatgaaatcctttggaatctctaaatcagataatttggattcactctggctattagaatacaatatccacatcctactggtagtatgattctggatatattatgctgctttctccaagatgagataatactgctaacttcattctctccaagggcctttgcacaaatcatgtaaaaaaaaaatccatcaataactaacttgcccctgccacatttatcaggtgaccactaatgtgtcaggccttgaaaggactacaatcaaatgttacacacctaagtgagcccaagctagaagagtcagaaggtgaaaataacagcctcccaatgacatcactaggccatcatttctcaaccactgggaagccatgggccctttaaaaattagatgagctttatgagcccaagttccactcaatacccttgaagcctatccaggaaggatccttggcccccagttttagaaatacttatgaactggagagaagccacccaagtcttctgatccatctttccccttttcccctgtgaacactgagacttcattactctaggtggactggctagctctcttcccttctgaatcctgctccttcaagtaagcctttcatctgcagaagatttcaaaaaaataaaagaccgaattcaaggtaaaccttgggtaatggtgctctgaagtgcagtggtgtctagttatggaaaggaacaaacacccctgccctctgctctgtaagtggcattctaaacccaccaagggacttgcccagtcctccagcaagtcctccaggccctgctgccctgttatccttggggttgcaggcagcaaagttctagggaactcaggtcccagaaaatgcagtgattctgaatgtccaacacagacttcatattccaaagggatactagttctcatgttactataaatccttcgagacagagaaaccaggtaactttatttctcattgtttaggattttctttttattatcaaatctctgctatagaaacactgaagaaaatgggaaaaaaaatcactggagaggcagcataaaatggtggctgaaaacaagaactctggagccaatctcagctctactcccttactagttgtgccccttaggtaggatccttcaacatctctgcttcagcttagccatttgtaaaactggggtaacagtacctatctcagagtaaaggggactaaacaagttaacacttggaaagcatttaaaagaaagcccagcacataagtgttatatgtatttgtaaaactttttaaaaatctcaactgggttaacttttccatggatctttcaggtccttacccatatacatttttttagatgtgttacagtaagtatgtatatacaattctgtatcctttttattccttcatgttatgtatactgatgcagtgtccataattataatttatagtgattgcctaaaacaaattacaaactaattgcccaacaatgcagtgatgagtaacaatggacgctgacacactgggctaaggatcactttctgtccagcaacatcagtctcacactcctaggcaataacttttctaccgttagtcatctcattcattaattttctctaaggaggttaatcaacagtaaataccccattcaatactattatttttcttacattcagatttagcacttcatattctactcctgggcacccagaccctccccttataacaacaaaatctgtatttctacaattatgcacaaaatgttattgtagagttttccatccagtactccagcttgatgcaaaacagtgtatttccagtcaaaaacttttctctgcataaggtttttcccttagcaattcacaccaatctacaattggtgagagctcttgctaaaagatgcctcattccccacagtcatggtcctcaagtatgaattactggtagaccataaggggagtttagagtttccttcattgttaattatctgattttgagtaagggctaaataactgctgaaagcttttccctattcttttccttcatggggtttcttctaagatgatattttctagtaaataatgtgggagaagtcttactgaactcttaatgaaaaatgtcccctcttgattatgtttatagggttttcctcaatgtgttgtcaaatgtacaagaaacgaaaaactcgcataaattcaattcagtttctcttcactgtgatttctctggtgttgaagtagggctgagtgaccactaaaggcttttccacattcactgcatataaagcgtttctctccactatgcattctctgatgaataataagggaagaattcttacaaaatgctttttcacaatgattacatttgtagggcttttctccagtatggtttcttaggtgtacaataagggatgaactctcattaaatgctttcccacattcattacacctgtatggtttctctccagtatgagttctccggtgtgcaatgaggtgagaactacagttaaaggatctttcacactgattacatttatagggtttctcaccagtgtgaattctccgatgagcaacaaggtgacagctctgactgaaggattttccacatttattgcattcatagggtttttctccagtatgagtcctttgatgtctaacaaggtgagccatctggctacaggattttccacatttattacattcatagggcttaattccagaatgaattatctcatgtttagtgagggctgagcgttctctgaatgctttgccacattcctgacagttatatggtttctctcccgtgtgagttctctgatgggcaataagatgggagctccagctgaaggattttccacattcagtacatttatatggttttgctccagaatgagttctttcatgtttactaagggctgagtagtccctaaaagctttttcacattcatcacatttaaagggtttctctccagtatgcattctcatatgggcaataagatgggagctccagctgaatgatttcccacattcagtacattcaaaaggtttctctcctgtatgagtcctctgatgtccaataagatgagagttccagttgaaagatttcccacactcattacaaacataaggtttttctcctgtatgaattctcttatgtacaataagatgagaattccagctgaaggcttttccacatttattacattcatagggttttattccagtgtgagtccgttcatgtttcgtaagggctgagcgattcctaaaaacttttccacatttatcacattcatagggtttttctccagtatgagttttcttatgttgaataaggtaagagctccagatgaaagacgtcccacattcattgtagtcatagggtttctctgcagtgtaagtgcttgtatgttgagtaaggaaagagtcatacccaaagactttctcccattcattgtatttatacgctttctctacagtaccaattttttgatgttccataaaggatgagaaataaaagatattctcatattctttgtaattatactggttttctccaacatgaagccttgggtgttcattaaatgatgggctctggttaaagatttgatggcattccttatattcatagagtttttctcctgtgtgaattcctttatgatcaccaaaatgtattatatgattgaaagatttaacagcatcagtacatttgaaaagattatctccagtttgtattcttgcagggtaaataggttgaatggactgataaacagttttgtcataatcattattttcacaggtaaccttatctgcatacattatggctgagtcacatctccaactttgagcatgtgtatcaggcttatagaaatgttctatctgagaaactctctgagatggaacaaagtttaagttctggctaaactctgccccaagtccacagaattcagagcttctctgggatagtacttgcttttgcatgaagaccatctgcctcatagctgtactctggttcatgtggtacatttctaattggtctttacatcccaaaacttctaacctggagaaccaaggatcatcccatatatatctttccaacttcatgccatgggattgttcttcctcaaaaatgctctgtgctgggatcaatgctttgctttcaagatttctcacccattctgaaacagacagaaaaaaagctatgagagcatagagaaagacattagaataaagtgggaatggtgagatttactgtccatattatcaaaaacactagtataaatttgttttcaagtccaggcttagaactcagagaaagatcataatagggaaaagaatagtgaaaagtaaacaacagttaaccagaatacaaagtgtgtactgaaaactaatgaaaccatttaaaagtactttccatgaaaaggaagaccagtataagaatgtgcaagaaagaggccggacgaggtggctacgcctgtaatcccagcactttgggaggccgaggcgggcggatcatgaggtcaggagatcaagaccatcctggctaacacagtgaaaccctgtctctactaaaaatacaaaaaattagccaggtgtggtggcgggtgcctgtagtcccagctgctcaggaggctgaggcaggagaatggcatgaacccgggaggcagagcttgcagtgagccaagatcgcgccactgcacttcagcctgagcgacagagcgatacaccgtctcaaaaaaaaaaaaaaaaaaaatgtgcaagaaagagttaactctgcaggcctgacgtgctcaaaccttgcaaaggtagcctgtttcctaactggcccttagccaactcctaggaattaagatcttggaatgttctaactagtaagagtgttttgcatgctcaaggtattgaagcacatttacttttaacttatttagatatgtgtgcaaacaatgtcattcatagtgatcacctgctttccctcagggtggtctggagtttcagcgatggcagtgagtcacgcaggcactgtgtgcctggatgagcaacctctcaataaacacactggactcctagactcaggcaagtttcctagtagaaatttcgcacgtgttgtcacaactccttgcttgaggaattaagtgtgccccatgtacgctactggaagcttgcacctggtctaacctcatgcacctttttcctttgctgatgttgctttgtatcctttcactgtaatacaccataatcctgagtataatgacttttgagtcctataagtactcatagtgaatcagtgaacctggaggtggtcttgaagacccctgacaaaaggacccagtgaatgttattaaggttaaaaaagaaaaaaaaagaataaagcctttcatcttaacaaaagttaggtagatgagcacacaaggcctttagcaagtaatatttacatcatgagtgctctcacttctgtgttataatgtccttctactcccatatcttgacaagtgcagaaaaaaggaggagaggggtgtttagagagtatcaccaagcgaggcttcaagccaggatgttatctatgacaaaatgctttgtttcctatgtcacagaatccagtcaatcacacaagatccaccaacccaaagggcaaacatcaccagagtttatggatacccctaaagttacacttctatccaccacagaatatttttagagcaatgatagatggactaggaagacagcatagtgtgaaaaaacagacacaggagttacagtctgctaatctgtatgtgaacaatggccctgctgctatccttagagagcttttctgatgactaaagtcgagactcagaatccagccaaactcctggcaagtttaatacacaggaactgcctattatcactgcttaagtatcaatcctctaacaaccaaaggaggctatattagtttctttctgctattgtaacaaattaccacacatttagtaacttaaggtaacacaaatttatgatctttccgttctggaagtcagaagtccaaaacggctttcactgggctaaaatggagttattggccgggttgtgctccctccagaagctctaaggaatccaccatatccttgccctttccatcttctagaagctgccccaattccttggctcgcagctccttcctccatctgcaaagctcatcactccaacctctgcttctgtcatcacatcctctcccatgtctctgaccctcccaccacaatcttataaaaggacccttgtgagtacatttagaatccactcagacaatccaggataatctccccacagcaagatccttaatttactctcatctgaaggtcccttttgccatacaaggtgccccattcacaaattctggagattaggatgcagatatctttgtgggggaagtcattatccagattgctacagggtctaaagccccaggcaggtcccaacaagaactagaccttgccctctctctctgcttctttttttctctttactatatgtaatttccccccttttaccacccaagtccattattttttgtttaatttttttgagacagggtctcactcaggcaggagtgcagtggtaccgtcatagctcactgtaatctcaaattactgggctcaggcaatcctcccacctcagccttccgagtaacaggactacaggcatgaatcctgtatatacaaccatgcctggctaaatgtttttaaattttttatagtgacagggtcccgccatgttgcccaggatggtctcaaattcctgggctcaaataatcctcccaccttggcctcccaaagcactgggattacaaatgtgaacccccatccctggcccccacgaccattataacagaggttctactctgcacaactggcatttattatcaatttcaagctcagctcttaaaagttactgaattatcttcatatagatttttaaatccttccagtaaaagctttttacaaatggaagctgaccaattccctgaccaaatgaaagaccaactgaaagaccaaatgaacagttcttgtccaactttatactcactcagtacttgtagtctactgagtttccagcaccagagacaaggcaagaaagtacggtctccctggaagtcagaatctatgtgaagagagatcctaccaaacagtgatgaatatacatgaaatatcactctgaggtcgggcatggtagctcacgcctgtaatcccagcactttgggaagctgaggcgggtggattacctgaggtcaggagttcaggaccagcctggccagcatggtgaaaccccgtctctactaaaaaaatacaaaaaattagccgggcatagtggcaggcgcttgtaatgccagctactcgggaggctgagacaggagaattgcttgaacccgggaggtggaggttgcagtgagccaagaccacaccattgcactccagcctgggcaacaagggcaaaactccgtctcaaaaaaaaaaaaagaaaagaaaaagaaatatcactctgagatggtggggttatagaacagatgctaagtgggtgggagatcaaaaaaggacatcagcactaactgaagtgatcgaggatggttcacacaagagaaacaacatgagctcagccttgaagcacgacctgggtacagactgactagtcactcagcatgagcagaggcatgcatggcgtgaccagtgtgtgaggaggaagataaggatacctgctgaataaaactccaggagctattcaggaaatgagagaaacaatagaaaaaatagaaggttttgaaatccagttgttttgttacaaggcaattagaatcactgtaggtttactgacagggatctcataatcaaagatttcagggatataaatctagaaatagtacctgaggtggctaataacaagtgagaatttcctcatcaacttgggctggaattttacgagaaaggggccggactgtgagagtgatgatggaagctgaatgacgtaactaacatttcagaggaagaaaatcttgggagttagaagagagattacttcttggagaggaaagagctcgaagtcaagatgacttctcaatctccagcttaggggacatgcagaaatgcacctcaggaagatgggagaacatctagaaagtagagacaagattactggttctatcggctgtgatcaaggagacaggtgagatgctttgtaaaatgggagaagtgtaaggacagaggtgctggaattgcagggctctggatggtaactaagaatgggcagcactgaaggtagaagaattaaagctcctggaattcatgagctcttaggggaaagtttccaatctgaatggaaaacaactggagagattctccacaaaagtcccctccattagagtgggtggaagataatccaacttcaggactcaagaagaggctgtggcacattgccaaaaataataagataaagacaatgtgtataatctcctattgttgaaaacatgaaaaataactacaaattcctacatgcttgtagctgcataaagaaactctgttatgcatgtaacagaaattactaaaagtgattacctgaggcagaatgtcagtgaaaatggccaagtaaagacatgtaaaatttcaccactctgtaaaaccaactaaaaaactggcaaaactgtcagaaggcaatttttcaaaattctgtaaattaaccaaagcctaggccaggcgcagtggctcatgcctgtaatcccagcactttgggaggctgaggcggacggatcacgaggtcaggagatcaagaccatcctggctaacatggtgaaaccccaactctactaaaaatacataaaaattagccaggcgtggtgtcgggcgcctgtagtcccacctactaggggggctgaggcagcagaatggcgtgaccctgggaggcggagcttgcagtgagctgagatcatgccactgcacttgagcctgggcgacagagcgagactccatctcagaacaaaaacaaaaacaacaacaacaacaaaaacacaaaaaaacaaaattaaccaaagccttgcagcaaccaggaaaacatgtattctagaaaagtaaattttaataagaacagtaagctatatggtgttctaacttaccccggtcccatctctggctcagtaacagccttggaaaaatgacagcccccacttctggtacttcagtgagcagaacaaagctggagctttttcaaagcctcattctcaaagaacactcattactagacctgcctagtggctccctggaagactccactggaaaagctggtctttattttgcctgacagagaactctcatagtgttacaaaacctctagggaggaggtacttttctaacatttacaggcaatgttttaaagtcaccactgcctgaggtgatggcaaacaggtggggcccaaaacacacgagtcaaaaagatagaatgaaagagctgaggaatgagatgtctatagggactctgagaagctccaacctagaaggctacatgcatacccataataattaaactagggccaggggtggtggctcacgcctgtaatcccagcactttgggagggcgaggtgggtggatcatgaggtcaagagattgagaccaccctggctaacacggtgaaacctgcctctactaaaaatacaaaaaaaaaaaaattagctgggcgtggtggcgggcccctgtaatcctagctacacaggaggctgaggcaggacaatcgcttgaacccaggaggcagaggctgcagtgagccaagatcgcgccactgcactccagcctgggcgacagagcaagagtctgtctcaataaataaataaataaaataaaataaaagccgaagagagaatcctgaaagcagagagaagaaattcatcacgtacaagggatcttcaataagattaacagcttgtttctcagaaacgactcaggccagaaagaaagacaaaaaaacatgacaatcaagaattctatacccagtaaaattatccttcaaaaatgaaggagaaatcaagagatttccagataaacaaaacgccacagttcactgttagcaaacctgtccgacaggaaatgctggctggggatagtgactcacgcctgtaatcccagcactttgagaggctgaggcaggggcatcacttgagctcaggagtttaagaccagcctaggcaacacagtgaggcgtggttgtgtgcacctatagtcccagctactcaggaggctgagatgggaggatcacttgagcctagaaggttgagactccagtaagccaagatcatgccactgcactccagcctgggcaacagagtgtcttttctatctcaaaaaacaaaatggaaatgctaaaatgagttcctcaggctgaaatgaaagaacattcaacagtaactcaaaataaaaaacagcaataaagatagctacataagtataaaaagacaatataagtaaaattcttgtttctagctcctttttttcagtctgttaaaagacaactgcataaagcaataattataaatccatattcatgaacacacaatgtataaagatgtaatttgtgacaaaacagcataaaaggaggagggcagagctatacacaaagttttggtatactattaatattacactagtattaatccaaactacattgtcataaattaagatgttaattgtagggccaggcgtggtggctcacacctataatctcagcactttgggaggccaaggcaggaggattgcttgtgcacaggagttcaagactagcctgggcaatatagtgagaccttgtctctacaaaaaaaaatttttttttaattaactgagcatgacggtgcatggctgtagtcccagctacctaggaggctgaggtgggaggactgcctaagcttgcaatgcagaggctgcagtaagtcaagattgtactactgcactccagcctgggcagaagagcaagaccttgtctcaaaagatgttaattgtaatccccagggcaactaccaagaaaataactcaagattttatagtaaaagaaaagtagttacctgtgtgtatgcctctgtgtatctgtgttttgggggaataacagtaatgtgagtaacagcagggagtaaaaatgagttatttttggtggtgtttttcagacagggtcttgctctgtcactcgggctggagtgcagtggtgaaatcacagctcactacagcctcaacatcccaggctcaagcaatcctcacctcagccccctgagtagctaggaccacagacatgcaccataaagcccagctaagttttttaataaaggagattttttttttagcttatacattttaagtagctttcagatatttgaacattacctatattttaaaaatctattttgtttggtacccacaagatctaagtaagaaagaacaaaagcccaagccgggaacggtggctcatgcctgtaatcccagcactttgggagcccgaggtgggcggatcacttgaggtcaggagttcgagaccagcccagccaacatggtgaaaccccgtctctactaaaaatacaaaaactagccaggcatggtggcgggtgcctgtaatcccagctactcaggaggctgaggtgggagaatcgcttgaacccgggaggcagaggttgcagtgagccgagatcgcaccactgcactccagcctgggcgacagagcgagactttatttcaaaacaaacaaactaaaaagcccaaaaagactatttttttgaaataagcatctatagctataggttacaagtttggcaatacaggaaataaggaaaatatttgaagtagctacatggataagaggtaaccttagaggcaaccttagaggaagggaccgcagaaaacaggagccatcaagagccgacagcgagggaaaatggctaccttattaggatggtgatgcttctttgctctaaatcaaaagcagcaagagaagaaagctccttagagggaattctaaatgcatctgaggaaggtaactcttcatggccttatcccatttctcaacaaagagggcttggggggaagttccttgttcagcctggggtctgccctcacctggacaagtgcgttgaggacatgcctgctccactgaccacggctcttctccttgctccaacagggagatgacctcaggcttggcaatctgatttcctatgcatggaggaaaagcatggaaatcatgtcatgaggcttcaggacagccaaagaaagcttctcttgcctattcctccctgtgacttctcaacctgggcagaatatgcaaggtccttcccactccatgctctttaagcattaggagtttcatccctgaacctcagggcccaagatcatctcagctcttctgagacaccaccctcgcccctgcaatgagcttctaaacatggagcagctgaaggcattaccatgggaacagcttcgtttacttgggcagcacctgccttacccacagagagcaggtgaccataggtctccagcatcacatcacggtacagggtcctctgaacaaggtccagctgcccccactcttcttgggtgaagtccacggccacgtccttgaaggtcactggttcctaaaagaacacaaacgttccttctcagcctgtgaccaccccctccaatatttccagggatggagtgaggctgacagccctggggagagaagacaggatgtagagaaactctcctggttattcaagagtctgactaatgtgagtcaggtctcattgagaaccacccaagacctcatatttgttatatactcttagggaattagatacctgggtccacaataaccacagcaaagctgagcaggtctcttcgaagactcttgccaaattccagcacactggctatgtcccccaccttggcaacacccctcttctggaaaggcagtcatataaaaaggcctggaccagtgcagcaacaggctatgagcactggctacaagcgagaccttgaggatggagtctttgctccgacacccagataaaggacctgaaagggtgatctgtacattcacaagttgtctttccagccatggtggggaggtttccattctcagttcatctctgtcccaaggactgaagctaagggtgagcaggatgccccagagcagcccaggccaaggagaatcggttacagctgccattaaaagcacattagttacaagcaatctaaactgatttttttttttaatgaaagcaagaaaactaactggaaaacgagaaggaaaaaggaaaggtaatctaagtctgatttttccaatgaatacatccctcaagtccttttattattattttttaattattttatcgagacagagtctcgctctgtcgcccaggctggaatgtcatggtgtgatctcagctcactacaacctctgcctcccaggttcaagtgatcctcctgcctcagcctcccgagtagctgggacaataggcgtgcaccaccccgcctggctaatttttgtatttttagtagagacagggttttgccatgttggccaggctggtctcgaactcctgatctcaagtgatccgcccaccttggcctcccaaaatgctgggattacaggcatgagccactgcacccagcttcgagtccttttaagaaatcaactcgccaggcacagtgactcacacctgtaatcccagcactttgagagtcctaggtgggcggatcacgagctcaggagatgagaccatcctggccaacatggtgaaaccccgtctctactaaaaatacaaaaaaattagctcagcgcagtggcacacgcctataatcccagctacttgggaggctgaggcaggagaatcgcttgaaccagggaggcggagcttgcagtgagccgagatcgtgccactgcactccagcctggatgacagagcgagactccatctcaaaaaaaaaaaaaaaaaaaaaaaaaaaagagccgggcgcagtggctcacgccggtaatcccagcactttgggaggccaaggcaggtggatcacaaggtcaggagattgagaccatcctggctaacacgcggtaaaacatcatctctactaaaaatacaaaaaaattagccaggcgtggtagcaggcacctgttgtcccagctactcgggaggctgaggcaggagaatggcgtgaacccaggaggcggagctggcagtgagctgagatcacaccactgcaatccagcctgggcgacaaagcaagactctgtctcaaaaaaaaaaaaagaaatcaactcaggccaagtgtggtggtgcacacctgtagtcccagctactgggaaagctgaagaagtgggaggatagcttgggcccaggaggtggaggctgcagggagctgagatcgtagtactgcactccaaactgggcagtagagcaaaacccagtctcaaaaaaaaaaaaaaaaaaaaaaatcaaccgcaagacacccgctcaacagacacgtgtgcagtataccgctcccactccaagggtcctctggacctgtgcccctcctcttcacagctacatcatatcacttctacccaaatacagcgtttcctgtggccctcttagtcacagcttatgaactgagtttgctgtctctgatctgggccagacctccctgctgaattttcagtgtatccatttttactctgtctcaattgcttcccctctaccttcacatgatgggcttaaaacaaagaactgcttctgctccaataaataccataccctgaaaagtcaactcctgctcaagaccccccaggctcagccttactgtgccccatgacaaggactgtccatcctcttttccacggctgaacctcatctctgtgtctcacaacctcgaagacacagaatcatccctcctgcagcctcacaccccatgtagagacgcctcctgcaccctcgtcccactgcttctgacagtccatctcctcctgcaaggtacagtgcaccctcgccttctctccttccttgtcttccagccttaccccagtgcagttcctcctctgcctttattatccgttttcctgttccttggtattggaaattttttctttatatttatcatttttgctgatctatattgaaggatcttggagcaacaattatatgattcttatttttaccaagctctcaccaagatctccccaatgtcttgtgattgtcaagtccaaagtttgatttctgcctttaccttcttggcctatgcagcatttggaagtgctggccacaacctccctctatgaaacactccccaacccccatggtcaatgacaacttcttggttttcctcttacagactgcccagacctcagtatgcttgatgactactgtttctacattttatggtaatgtaaggtttttttatttaaatgtaacatggagttgggagtggtggctcatgcctgtaatcccaacactttgggaggtcaggagttcgataccagcctggccaagatgatgaaaacccgtctctactaaaagtacaaaaattagctgggcatggtggtgcacgcctataatcccagctactcgtgaggctgaggaatgagaatctcttgaacctgggaggcaaacgttgcagtgagccaagatcgcactactgcactccagcctgggcgacagagtgaaactctgtctcaaaataaataaataaataaataaataaataaatgtaatatggccacagaagtgcacaaaacctatgcttgatgcactttcacagagcaatggcacctggggaaccagctaggcagctgtgctgatggcccagggtgcctctgaccctgtgcttgtcttacacatcctaacctccctggggtggcaccttcttagatggcttcaatgttcacctacacttaacaaggtgcaaacccacaccctaatggctgaccagctggtagactaagccacaaattcacttcccacccctcccaagaccccaatggaatcattatatgttcaaaaatagaggaattacatctaataaacacaagaggaatgaaatcattggagcagttctgcagtccctaataaaacagtggacagtggcaatgaccatcaatgactgctcagctgcaggtgaaaggcagacagggagctttataatggaggggtcagtctgacaatacctgcacccactaacccatcatacctgaagatgggacaaccagacaccatgtgcccactgatgcaatgcagtatgaagaacccagcaccacctatgaagtattcttatcaaaaataccaaatgaatctactcaggcctctagtccaaatactagctaacaggagacgaggggatggaggaacttattcaatgacatcatgaaggcaaaaatcaggcaaaccaacaagaccagtgacctagtttcttcagcatatgaagcatgtgcagtgtgtgggccttgtttggatcctgatttgaacaaaccaacaactgtaaaaacatattttagagacacatagagaaaacaatatgaactggatatcaggtgacattgaggaattattggtaatttgctgagtatgataaaggtattgtggtttcttccttaagggtacatatctcttagatacacagaaacactcacaggtgaaatgatacaattctgagatttgctttcaaatcctccagtttaaaaaaggttgtgttggaatagatgaaaagaaatgcagaaagtggaaagctgacagctgctgaagctggtcaacatgggtgcttgcagcaggctgaataacaccccccaaaggatgcccatgtcctaatcctagaacctgtgactgttatcttaatgataaaaggaactttacagatataattaagaatctttagagggattaccctggattatccaggtggcccagtgtaatcaccaaagtccttatcagtgagagagggaggcaggagtcagagtcacaggagatatgacgcaagcaggggtcagagtgatgtactttgcagatggaggacagggcatgagtcaggaagcagtctccccttgagcctccagaagaaacacagccctgcagacccattttagacttctgagctgcagaacagtagaataaattcatgttgttctaagctataaagtctgtggtagtctattacaatagcaacattaaactaagacataaaactaaactaatacagggttcatcttctactttggggttcaaaaatctcctaaataaacagttggctttttttttaaagaacgttaaagaaataacccagccagtgaaaaaaaatgggggcgtcagcaccttgaattccacttattcctccaagaggcagaacagatagatgaaggtaaggctgaccaactagactagaagcgattccagccccacactaggaggcaccacggtgaagcaggtgcttcctgcaagaggactctgggagaggcaggagtgagtcaggctgaaaacagggcaggtgaaagtctgcactcgcacagctttgcaagtgcctgtgggtagtactgccagcagccatgtacttatacacgggcaaaagtcccaggagcctcctcagacttgagaccgcggctaggttctcaggctgcccaggtgagtggagacctcttcagtcccaccaggtggggaagagaagggagtctgtggcctcacagctctatatctatgaaactggaagcagaactgaccagctgaccctggcccatgcaggcccacgaaacccagggcatgcctcaccaggagcacagagcggagtggaaggcaccaatcatgaatcagatctatgcagctgaagtagaacaggacttccagcctcacagccctgccctgagaaacacacacagaccagacgtctcctggacatgagaaacacctgatgcacagataaagcgactgaactaagtagccacaaggccagagaatccagacaacagccacattcaactttcaaagacctgttaattcctattctcagattctcagaccagagtgatttcagtataaagtgggacaggatgctacaagagaggctgagagaataggaaagccttcacagactaagaaaagaacagaagacacagcaactagttcaggaggccctagagagttctgctgtggtgagaacatgatcatcaggcccccaacccccaccaagaaaaggacatggaatatagagagatcagagacacggcaatttgttcaggaggtccagcagctaacagaagagcccagaaagagaacctaaaggaaaaggacaagagggaattattactttttaaataacacaagacttcttaaaataagacacacagaaacactagccataaacaaagatagacacatttgacaaaaacataccaacattcaaatatctgactgataagacaccaccagttaagacaagctacagactgggaggagttagttgatatgtgataaagaattaggattcagaatgcatgtgaaatacctatattaaagtcagtccctagaaatctagggatgggggaagagaaacaaagagagaaggaaatacagatggccaataaagacatcaaaaggtacttaagctcactagcaatcaagaagatgcacattaaaggaatgcaatatacctttctggtcctgaggtaagcaaacatttaaaagacctgataatgtcaagtgtcgacaaacatgcaggaaaaggggtattttctcccagagtggggagactgacaagtagcttcgcccccttgtagagacatgcggcagcactagtaacactgaaagtatatacctagccgggcatggtggctcatgcctgtaatctcagcactttgggaggccgaggcaggtgaatcacgaggtcaagagatggagaccattgagaccatcctggccaacatggtgaaaccctgcctctactaaaaataaaaaaattagctgggcgtggtggcatgcacctgtactcccagctacttgggaggctgaggcaggagaatcacttgaacccgcgaggcaaggttgcagtgagctgagatggcaccactgcactgcagcctgggcaacagaatgagactctgactcaaaaaaaaaaaaaaaaaaaaaagtacatacctaaaaccaggtacaattctgcttctaggggtatgcctagataaaaactacataaacacgtgcacaaagtgaagtcacaggaatgttcacacagctttcactggagcagcaaaaacaatgggggaaagaggaacttataaacctgcccataaaagaaactatgaacacagaggtgcacttctctaatggatacactcggcagcgcaaaaggaacaagcctgacttctctgtatctatcaacatggatggacctcaaagttgaaaaaagaaaactataggaaaactacatatagaaaaaaatcattgggaaaaaaaatagattgttgggctgggtgcagtggctcacacctataatcccagcactttgaggcaggcagatcactgaggacaggagtttgagactagcctgcccaatatgacaaaaccccacctctactaaaaatacaaaaattagccagatatggtggcacacgcctgcaatcctagctacttgggaggctgaagcacaagaatcctttgaacccgggaggcggagactgcagtgagctgagatcatgccactgcactccagtatgggcaatgcagtgtgactgtctcaaaaaaaagaaaaagactgtctatgtctatatagtttatcatctatgtatgcatatgaaaatgaattagctgtgtacaaactgaatccatgagtggttgcctgagaaatggtggaaagacaaagagtaaaagaagaaaaacaacaaatacgacaaaacagtaatattgttcactgatggtgatgccatttgcttcctttttacacttctctgtaattatgaaatgtgccaaaattaaaactaaaataaatttttaaaaatttagaaatgaaaaaggggacattttcaaactgtaagccccatgggctaaaaaacaggaagaaaaaaagagctgcccccagctgaatatgtaaccatgtctgggcccacaaatcatggaggcctcacctcaaggatggtaaggggactgggcacaatggctcacgcctgtaatcccagcattttgagagggcaaggcaggcaaatcacctgaggtcagaagtttgaggccagtctgaccaacatggtgaaaccctgtctcgattaaaaatacaaaaattagccagtgtggtggcacacacctgtaatctcagctactcgggaggttgaggcatgagaatcccttgaacccgggaggggaggctgcatcaagccaagatcgtcccactgcactccagtatggacaacgcaatgagactctgcctcaaaaataaaaataaataaatggctggtaaggggacacagtaaacaccttcagcctagaattgcaaaggaaaatgcaaaaccaaaaggccagaaggaagagatggtggaagacaggaacctagtctcacaggctgtggagatgagagggacccttcaagggtaggagaggaaatgcaggtttcactgttgcctgatgctaaggggaaagggtgctaaagagagaagagtactgctacagggaggagcaaacccttctggtccacaggtcaccctcatgagctgcatttgtattttccaatcacatcctaggatgacttgcaaaagtgtttcacccaaattctcataaacattcttgcacacatcactttgtacacacatataagcatttatctaggcattctaagcacttcatggaatctgctaacaaaccagccacacatttaaaccctttgagagtctgaaggagagaccaaaggtgctgagctgggtctcagatgtttgctgacagatcttgcccaactgctcccccttcaaggaacctggggcaattcagatggcttctgtggtagatttcattgcagagaaggaaaacataaatagattgtgcacatcctcaagtctgaccaagcatgggtgcagactattattggtgttttatgtacataatgtttgttatgcagatatcctaggtggactgttaacagaggggtttgaatgcttccgtatttggaaaggctggttggggttttttagatgaaatgagatattatcattacaattattattttcccctattcctagaaataacgggatctgggcttctgtagttaaaacctcactattcaacatacttccatgaatggactattcagataatgagggatgacagcatttgatgttttcaccagataaatgctttatttcaataaatacttaacttggagggaacaataaagggacacagggttcttttgcattcctgaagatctcacttagttaaaaacacacagcagtcaaatccgagtttcccacaggaaaaaatccagagtgtggggaggggggccagccaggagcatgttatcagaaatcacaactcttcagacattggagggtgttgttatttttaattctgttttattttctcagcattaacttagataattctcagaaagcctagcataaattaacagcagagtgtagcatggtggttaacagggcttcttcgcagtgttttattacagctaacttctactcctcagagtctgattcaggggccatctttcaggctagtctagcttcactactgattattctgtcttaggatttaataatgactgtacattgtaagagcagcaaacctcatagttgcccaagttctgatgccaggcaacaatcaccttgcatcatatggttcaggcccttctgcttcccatctcacctggaccagggatagcaacactgccaagtgggaacagcatacttatgatggacttcacccaccagatttgaaactgtgggcggtttcaataatattttttaatttgagggggaggcacaaagtagagacatcatttttaaatcttgttttatatccaagtatctcacatctgcttgattcattatcttaacttaaaaataaaagacctaaaaataagtaatgaaactctttttcttcatctttcatagcagggagttaacagagtaaatataactttaatgaattaggaaaaaaccaatttaaaaaatctcccatttagaaatacagagacaactctaaaaaactgaaaacaggaagttaaaaatggctgcctcagtcattttttacaatgtaattacattgtaattacacttattacatttacattgtaattacattacattaaaagaaatattgacacaatgctacaatatgggtaactcttgagaaggcaaacattatgctaagtgaaaaaagccagacaaaaaaggctgtgccatattatgattccatttttatgaaatgtccagactaggcaaattcatagagacagaaagtacactagtggttgggagggagtaggggaaacagggagtgactactaatgggtacaggatttctttttagggtgatgaaaatgttctagaattagatactggtgattgttgcacaattctgtgactatacgagaaaccactgaattacacactttaaaaggataaactttataatatgtcagtaccatctcaataaagctattataaaaatttttttaagtggctgcatctggtgaggaggctgggcaggaggacggcagagagatgacacctttcctaagtaactccattgtcctatttctctcaggagccaccctgtccccataatcacaaaggcccctgctttgatttccttatacctctcctccatagctccaaggccctggtcagactgaagcctgaaacaccagcctgcttcccacagccctcttctttccacacccatcaccacattttggaccctggtgccgcctgatcccaagacttctgaggttctgcagcaagcattcagggcctggcctctccagcctaaaatctaactggagtcagtctcactcaaacactggtcacacagtgtgctgcctgccacccctgacccctgtggtgctgcaggaggccagacccccactcaccaggctgtgcccaactggctgatgcattcttttcacctcttggcccaggtctacgaagcagccttcccctccacagtaaaagctgagctccacacagactctgtcccatctcccgactcatcaggtgactgtgctcctgcaggcctaccctacccgtctcaggtttctcctgtcccacactgcacgtgtggctccaggtaggccgtgagatctccttagctgagtgaataaccctggaaaagggtctgggagctcctcagggtgaaggctcacacctgtccttgttcccttcacagcaggcacagcaggcactgcacagcatcagcctaaatcgggtgctaaagacatgagtgaaggtggcaatagagaagtggggctgccagccaaaagggctgcccttcatgccccacaacaagccagggagagttggagctcagtactgtggacagactggttgacactaaggctccgaatcactaaaaacggcctaattctccctacctgctctcaggaaggattaacttccagttgcttccttccctacccaaactccaactgttgtaaactggagagccgcatcaactgggatgaccagggataacctggacatcatcctctgggaacaggacagccccatctcacctgaacctgggctgctgggagcccagtggccctcctcccctcctccaggcttccctccacgtgccaggcaggatactgaggacacagagctaggaaacgagaaaaaagtcatggaggcagctctcgctgccaggagctcaccttttcttctggggggctgagaaccagcccctgcccctcccccttgaatgaggaaagagacccacttcctcattctatagatgaaggaattagggctcagagaaggttaggaaagtacctaaacacatgaatctctcattggccccccctgtgctattgggtaccatctctgagaagcagtgtctggtcacaaccttcctgggcctgaaccctaaacggccacacatgaattctcatgcatcttgagatgtcaccatcaccttactgctcactggttttctttttttttttgagactgagtctcgctctgtcgcccaggctggagtgcagtggcacgatcttggctcactgcacgctccgcctcctggcttcacgccattctcctgcctcagcctcccgagcagctgggactacaggcgcccaccaccacgcccagctaattttttgtattttgttttagtagagacggggtttcaccgtgttagccaggatggtctcgatctcctgacctcgtgatccactcgcctcggcctcccaaagtgctgtaggcgtgagtcaccacgcctggccactagttttctgattcctccttgttccagctctgcacagagacagatctggaccacctgccctaaagccccacctggtccccattctattccccagctgtggcagagcactacagccagaggccacaatatggcagcccacagctgaccaggctcttgactcaccccaggaggcccatgggtcaacagctgtcatcccccaagattggtccgtaagggcacctgcacagaaggatcaggttaggactgtgacaccaaacctagtgattcaaggcgacaaaatacaagaggaggctgactcgctaatgggcactacaaaattccataaacagagcccaagggtgtgtaaaaaaaatgcaacataagctggattcacacaggcaatgcacaggtgagtcactattaattaacaccgttttaaaattaccaaccaatgctatataagtaaaaacaataaaggtaaaaatatatatgagagcagtagagacaatattttattatatgtatcactgttgtttaggaaaccccacaaaccaccagaaaaatcccttaaaactaatgacacctctcaggagatgactataaaacataaaagttagtgtcttttatgccaacaattttcctcctttaccaccaatcagttctaattttgtaccaagatagacagacccccttccatcctcaaaagtcctcagcccatcaccagctctgacccatgactgcagcagctaatgataggggaggcccaggagaaacacaacttggactcaccccaggaggcccacgggttgatggctgccatcccgaggactgattgaccaggcacctgcccaggaacacagcaaatcccaacctagtgacaaaagtgaaaaaagacaaaactagtcctttctcacagaagaccaagtgggaacaaagaagggaatccatccaccgaagcaacaaaaaaacttgtaaggagcatcgtaagaaaagagaatttacatgtcaaaaaagtaacacaattcctggagagaaatgaaaggtaatttgcataagctggaaaaaagagcatgatcctgaatgagagggtacaaatttgtcagctattcccaagagacagccagtcacaacacagatggaacttttggattaatctgacaattattgtaaaatcaacttgcaatcctcatatattagtggttgcctagagctgggggaaaaatgaaatggggagtgactgcttaaggggaacaagggtttctttgtggggtgatgaaatgttctaaaattagataatggggatgattgcacaactttattaatatacaataaaaccggtgaattgcacacttttaagtgcttaaagtgaacattatgttatgcaaatttaatcccacctccaaaaaaaattcacctccaagatttactaagcctaagcttgtgtgtgtgtggaggacttagagatgggcctggcgcccagacccctaactcctcaggttccagatctttgtacaagtcagcaacctctcgaatggattcctgggtatgtgtataaagcactagaacacacagtgggcctcaggagcaccggaatcagcgcgaaaacgcagaatgcaaaccgtactttgcaccattatttgcaacttgacagtgaccgccgccgtcactgcatgtttaagggaacccggagctgtttccaacccaggtctgacgtccttcacagtgctttgtgtgaactggcagggggagaaacgacggctggggaacgaacggggttattcgtcccatcaatggcctcagaagcatccttatcacctgcttccagagctcccgacccaaatttcctcctcaagaccgacgcggccgcgacgctgcaaaagctcgtcccggcctcacctggctcgcggccggcggtcccccttgaaggcggcgcagcaggatcggggtctgcccgcctggggcgtttggcttttgtcccgcgccgaggtccggcccaggagtgcgcttgggagctcccggcgcggcctcggggacaaaggcccgcggagccgacgtgcagcagagttcacccaggcccgtccgaccagaaaacgaagaacgcccggaggcgggaggccggaggcaggctgctggctggagaaccgacggcaacgacggcgcaaagccggcgcggaaagggcaggcgcaggacccaccctgacgccgcctctcccagccggctctcctgaccccccaagccccgcagctacggcggccccacagcctgagcaaaggcctcacctcagccgcggacaatggcggctgcttccccggcgtcgaccggagcgcgccgcggggtctgctgggagctgtagttccaggcgggcacttccggcgtcgggcagcggcgccgccatgacaggttcctgggccgcgccgcctcgccctgcctgggcggggttgggacctttctggcacctgcgtcgaagccggcggcaggatggactttgttgtcccggtcccagaccaccctcctccaccgtcgcctcccactgcaaaaaggcctgggtaagtcgcggccccgcgggcctcggtttgcccatccgcaaaatggcgcctcgtggtaccgggtttcccgggaggagctcggcgagttctcagcgctctcgagggatccttccatttggcgttcgcaagattgtgagaaagtgactgctgttattctctttaagataaggaacctaattcgagctacccttctctgtgaagctcgacggctgagaacgtcagggctcgttcccaagtctctttccagaggccaggctttatgggagcatgggttaccagcgacgcaccctgtgagttttcctctatcgatatgcatggagcggttcgggagcggtggctcattcctgtagtcccagcacttcgggaagctgtggcgggaggatcagttgagttcaggagttcgacaccaccctgggcaacatagcgagaccacatctctacaaaaaaaatacaaaaattagcccggtgtgatggcgcgcgcctgtagtccccgctacttaggaggttgcggtggaaggattgcttgagcctgggaggtcaaggttgcagtgagctatgatcgcaccactgcacttcagcctgggcaacagagcaagacccggcattaaaacaaacaaaaacgggccgggcgcggtggctcacagctgtaatcccagcactttgggaggccaaggcaggtggatcgcctgaggtcaggagttccgagaccagtctgggcaacatgataaaacctcgtctctactaaaaataccaaaaattagccgggcttggtggagggcacctgtacccagctacttgggaggctgaggcaggagaatcgcttgaacccgggaagcggaggctacagtaagccgagatcaagccattgcactccagcctgggcagcagggcaagactctgtctcaaaaaaagggactgagggactgtaggtggtgataccaaagaaagcatggccatttaggaagctagacttgagtgagcagtgggcaagagagattttgaagatatttccactagtaatggaggatcattttaaaaagctggcctgtgggttgggcttttgttgttgggtggtgttggcactcactgtgggtgggcaaaggggagtagccctttcagagggagaggaaaagttcaagtaggacaggctgaattcaagggagaggaaaatttcaagtaggacaggctgaattcgagggagaggaccatgagagaggtaaggtggaaggggcaaggtgttgggacaggccccagctggcaggaaggtgaacccagtcagagtgggcactgagaggaaagcaatctatggatggtacagccacaatttccatctcaggatcaagcagagaaagagaggctggagaaggaagagtgacagaagtaagaagagagtgtctctccacttccactccagccccctacagctcatcctccagcaggcagccaagggcacttttaggatctcacatcaggtccttgcctcacattctgcactggcttcccaagtaattaaagtaaaatccaaattccagctcacagcttagaaaactcagcaggactggcctctgtcctatcccacaccccacctcagtccctcaagctcatctcctgtcattcctgcccatttctggaccccagccactcctcaaacagggtaagtccattcctgcttcagggcctttgtacgtattgtttcctcttcctggaatcttcttccttgtacagccccagggttttctttttttcatccagatcacagcacagatgtcacatcctggtaacagccagctgtgactcatctccctaattctcaattgtattactctctttttattttcttcgtatcgtaactgatagtctcatacagtacagaagccaagttttaagatatgcaatcaccaaatacctgctacacaaacctcaatgttcatataaaataagactagaattcatattctaaagagagatgaggtagctctgttcacttttgagagggaactcaaatgagagagatacctttgacctaaaggtgtcaggaaaccagatgaagaaaaacacccctgctatgatttgaatgtttttatcctctccaaaattcatgttgaaacttactccccagtgcagtagtgttgggaggcagggtctaatgggatttatggaggtcataaggctctgctgtcatgaatggattaatgttgtaaaccaaaaaataaaattctaagccccccaccccccaaccatatgaatagacccctcctctcagccaagggcattccaaagttaatttgaaaaatgagttcgggccatgatgggaagcagaagctggacttgcctcattataccctcctcccttctagaattagtgatagaacagactctttaagtctgataagaaacatttacagtctgttatctccggaggtttcatctgcttggtaaaaccttgagttccacaaccccagacattcctttctattgacaataactctttaaatcaattggcaatcagaaatctttaaatctgcctataacctggaaactttctgtaccagtatacatcttatatgtattgattgatgtctcatgtctccctaagatgtataaaagcaagctgaaccctaaccaccctgggcatgtcctcaggatctcctgagagctgcgtcaggggccactggtcaccatatttggctcagagtaaatctcttcaaatattttacagagtttgactcttcgtcaacaatgccattgtaaaaggttcatggagagattctgcatgtgcttgcattctctttctctctctctctttctttctctccccccacccccaccctccaccaccctgccctttaccttctgtcaggtgaggatgcagtgtccaaggcaccatcttgaactcatcatcgccaaatatgtgagcaccttgatgttggacttcccaacctccagaccgtaaggcagtacatttctttgtaaattacgcagtctcagctattctgttacagcagcacaaatggactaagacaacccccgagataggaaggggtaaggtaaatgcaatgagagttggggttttcgatcttagtccagtaaaggagctggaactgttctgtataaacaaagggcaaggtaattgctacatagattcttttcttattattgctgattcttatcctaaaataaaggacattgccactacacatcctctagaatgaccaaaaataaaaatacagcatcaaatgggacgacatggtgccaactggaattctcataccctgctgatgggagtataatgtggtacagtcactttggaaaaaagtttgacaatttcttataaaattatacataaacctgtactatgacctagagattctactcctgtttgttcaaaagaaaggcaaacatctgtccactaaaagatatgtacaagaatgctcacagtggcattatttatgacggtccaaaccaggagataatccaaatgtctgtaaccaagagaatggataaagaaattttgatacgtcaatttaatggattactacttagcaataaaaataattagccatgctgggcgcggtggcttatgcctgtaatcccagcactttgggaggctgaggcaggtggatcacctgaggttgggagttcaagaccagcctgaccaacatggagaacccccgtctctactaaaatacaaaattagccggggtggtggcgcatgcctgtaatcccagctactcgggaggctgaggcaggagaatcacttgaacccgggaggtggaggttgcattgagccgagattgcgccattgcactccagcatgggcaaaaagagcaaaactccgtctcaaaaaaataaataaataataattagccacatatccacacaacaatattgcattatcacaggtatagtgataaatactgtatgattccatttatatgaagttcaagaacaggcaagtaatccatgatgaaagaagtacttacctctgggggtggcagcattgactaaagaggtacaagggagtcttctggggcctggaaatgttctatatcttgatctgggtggtggttacacaggtatacgcgtgttaagaaatcatcaggctgtatacttagtgtactgtaatggcattacactgtctttcaattaaaatgtgaaagaaaaaacgggggtgtcttttgcttccacatttgtagccccagcttctgtatctcctgcgtgataatggttggatgaattaaaaggtaggaggaatagaagaggagaaaagcaataggaagaggaaggctggaagaaaagcccagctccactgtctcacttgggtgtcactgggtactggggaatttggaagcactagggaacagagaggaaggtgctcccttaggcttccacttctcagcccagtagtgagaggctatgaagctgttgccccctggtgggggacaagtgagaccagtgagagagggtttttgccttagaattgccccttccctggagacagcagcaagatgaaggcctctcaagaagtgcttcatcctctggaaaccagcggaggaaatgactttcccaagagaaggatcatacatcactcaatcatcagcaaacatttatgaagcacctgctctgtgccagaccctaaagtgaaaaaaaacaaacactgcacttacggaagcacgagataaacaataaacataagtaaattaaagagtagttagaaggcaacaactttggaagaaagaaaaaagagtaggtgatgtagtgcccagatgggaagggcaagttgccgtataaaattgggtgctaagagtgagtcagagtcacctcattgaggtgacatctgaacaaggactggaaagaagggatgcagatggctgggcgcggtgcctcacgcctgtaatcccagcactttgggaggccaaggcgggcggatcacaaggtcaggagatcaagaccatcttggctaacatggtgaaaccccatctctactaaaatccaaaaaattagccaggcgtggtgacgggctcctgtagtcccagctactcgggaggctgaggcaggagaatggcgtgaacctgggagacggagcttgcagtgagccgagatcgcgccactgcactctagcctaggcaacagagcaagactccgtctaaataaataaataaataaaaataagagatgcagacatcggagggaagagctagaacaaaagccctggtgtgagggcctgcctagtcagctgcgggaacaacagtggtcatagaggcaataagggggccagatggtagagaaagttgaaggcatcatgagggctctggcagggttctgagtagagcattgatgagctctagcctctgtatggagagtaaccaaggaaagcagtagagtcatgtgtgaaaccaatgtagtaattaggtggaagatgatagccgctcggatcagattggtgatcagtggctggattgcggacatgctgatactttaaaggtagagccaacagaccgtaggttcaaggttttgcatcataaggggcaatatagcctgtaatgttcagaaggagtcaagaaataaaggaggcctctcaatacagagctattcaccaagggccttgatggggaggaagtaagttgcaagtgtgtggagatactgctcccttctggcccaagctccctcccactccagttacccagtgttgcgggcagcaccctattctcttctgggaggtagcggaggcagagccacaccatcattttggatgcacctattatgggaggctggagtgcaatggtgccatcttggctcactacaacctccgcctcccaggttcaagggattctgcctcagcctcctgagtaactggggttacaggcgcgcgataccacgcctggctaatttttctatttttagtagagatggggtttcgccatgttggccacgctggtcttaaactcctgacctcaagtgatccgcccgccttggtcttccaaagtgctgggattacaggtgtgagtcaccgtgcccagcctggacttgccttttacctcatccgtggtgtcttttgaagaaaaagattctttagaaatgttttttctttcatagcttgtgttttatgtattactttcaagatcccaactagatctaggtcctaaaaatagtatcctacctattgtttttttaatcaacttaattgtggtataattgcacactgcagataaactgcacatgtttgaagtgagtaatgtaagtttttttgtcttggagccctgaggtaaacttttatttcttagctgacaggacttccacacccatgctcctctcggcacctttcacccagcccaagcagcggcggcccagtggtggaaaaggtgccacggccaaacggattggagactcaccccgcattctaggccggagaagcgggcgggcttgggatgccggcaggaggcaatgactctccccaggcgctgcatcctggctccggggcacaagcgcctctccgccctgacgctgatgctcgtctggctgcccgttctttggcatcaaaataccagacgatggtggcgcaccctgtggcctgggctgcctcacctcattcggtcccgcctagaaagaccagaggaccagaaaaccagaagcctgtcagagcgactagaggctggctccagccaacagccgcgcgcctcagcgtccacgagggttacctgggtaacgcgccgcttgggctcggcgcccagccgatgacgtaacccgcgcttgcgtagtggcgccgccctgatgtgtagtctccaggccgccccgaacaccagcccagcgggtcctggacccctaggtcatgtggctacagtggaatccaggcttggccgaatccaggacgaccaggccagacccaccggcagtaccttgcccgcccgctttagtcacttgctctaggtggatctaaacctctaggcctgggcgcggtggctcacgcttgtaatcccggcactttaggagggcaaggcggcagaatcgcttgagcccccggcagcatggagaggtggcagaggcagggccataccatcatcttgggtgcacctattatgggaggctggagtgcaatggtgccatcttggctcactgcaacctccgccccccaggttcaagcgattctgcctcagcctcctgagtaactgggatcataggcgcacgctaccacgcccggctaatttttctatttttagtagacatggggtttcgccacccccggcagcatgggtagacatggccctcccgcctgatctcttaaaaaaactttaaataattcgtggggggggttaccgcccacctgttttcccagctactccggaggctgcggtggaaggatcacctgagcccaggaggtcaagactgcagtgagctatgatcctgccactgcactccagcctgggcgacagcgtgagatcctgtctccaaaataaataaaattatgtacatatgtatgtatatttaattacatatattttgtataatttgtatatagtttataatatatacatgtatgtgtacacatacataaatatatgcgtaaatatatatatgcatatatatatgtaataaaatattaagaacccgcccagccgaagccacgggcgctttgggccctcggttggcctcagccacttcagtcgcggccccggggatgttgggggaaccctgtcaggcagcaagcgcgtcctccagccccgggcggccggcggctgtgcacccgccctccctccctcccacggcgctcgcctgcatgcgttttggcaaatatctaaacccgcaaaaccatcactagctctggtttcccaagatccttgaagcccctccgttcagcattccacgcccctctctgccctgctttcaaaccaccgccaatctgctttctgttatatatacagattagtttggattttctaacagttgtatataaatgcagtgacacatttgagtgtactcttttgtgatctggtttattttactcagcataattattttgagattatccattttgttgcatatgtaagtagctcattccttctattgctgagtggtgttccatctcatggatgcaccaccattgtttatcacgcatctgtccgtggacatgtaaactgttttctatttgcggctgttaaaaataaacttctgtgaacattcgtgtacaagtcttcctaaggacacgcatttcctttcctgttggataaatgcctaggcgtagaatggctggatcatataggaaatgaaaattcaactttttttttttgagatggagtctcactctgtcgcccggactggagtggagtggcgcgatctcggctcactgcaaactccgcctccgcggttcacaccattctcctgcctcggcctcccgagtagctgggactacaggcgcccaccaccacaccaagctaattttttcattttagtagagacggggtttcaccgtgttagccaggatggtctcaatctcctgacctcgtgatccacccgcctcagccttccgaagtgctggattacaggcgtgagccaccatgccccacgaaagttcaacattttaagaaactctccatttgttttccaaagtgtttgtaccgtttcacattcccaccagcaatacacagatgctcctgaactacgatagggttaggtccaaataagcccatggtaaactgaaaataccatgaatcaaatgatttacaatacccaaataaatccgtcaagttgaggagagtactgaatttgtatagcttgtataccatcataattttgaaaaatcataagttgaatcatggacaaggactgtataagagttgtaattcctccatatccttggcaacatgatatggtttattttttgcaattctaataggtgtgtattgggtattgcactgtagttttgatttccctaattactaacattaaacatcttttcatatacttcctttccatttgcatattttgtggtgaactgtgttcaaatgctttgcttggctttaaaaaaaaagtagctgaaattgcttgttttcttattgttgaattttatcttttattctttttttttttttttttttttttttttgagatggagtcttgctctgtcacccaggctggagtgcaatggcatgatcttggctcactgcaacctctgccacccaggttcaagtgattctcctgcctcagcctcccaagtagctgggattataggtgcacaccacgacacctggttaatttttgtattttgagtacagacagggtttcaccatgttggccaggctggtcttgaactcctgacctcaagtgatctgcccatctcagcctcccaaagtggtaggattacaggcgtgagccaccacgcccatcctttaactatcttttaatccacacagaagcccagagctcaaatcaggggccctgatatcttcaacaaggcctggctcgtgggtttatggcgcaggtctgaggagctcctggctccacgtttcccaccgatcccagtgtcctcgcctcacccagtctggggcattccgctcgggctttagcaggatgatgtaacatttggggcaaagatgccacccagcagccctgccatggaagccaggatggaaaagatctccacggccacagtggacttgccctgtgcgctgtggtacaggggcaggaaggttgtccagaagctgcagaacagcagcacgctgaaggtgaggaacttggacttgttgaaggcgtctggcagacccctggccaggaaggctacaaagaaggtgcccccagccaggaggcccaggtagcccagcacacaggagaaagcgacagcagagccctctcagcactggatgacaatgtggctgggctctgaggccatgtccccatctgggaatggtggggaagtgcccagccagatgccacagagaacaacctgcaccaaggaagcagcaaggaccaccgaggtggaagcgccaggtcccaggcacacccagaccctgtcacctggtgaccctgaaggccaggacggaagagacagccatggtgaacacaacagcaactgtggtctggtagaggcggcaggtggcagctgtgggacaaccaaggcaaggcaagggacagagggcacagagggtcagggaggtgagcggcgtgcagctgagagctctgttgttggccccgaccacaggtgtgtctcggtgcttcagaacagtctgaggaccagcactgccaggctggccagcatgagcgccaccaaggcgagcatgagtcccagggggtcgtcaaaggccaggaaggtctctgtcctgggcaggcagccatctctggtgcggcttgagtactgctcctctgggcacagaagacatctcttcgtacctgtgggagacacacatccctgcgtctgccacaggatcgtaatgacaccagccatgtgaaggaaggctccctatgcactaaaccagccttaccagcgtttcacacctattcattactgattgaagggggcctgcccctccacacctgtgggtatttctcgcaaggtggagacaagagactgagaaaagaaataagacacagagacaaagtgtagagaaagaaaagtgggcccaggggaccggcactcagcatacagaggacccacaccagcagcagtctgagttccctcagtatttattgatcactatctctaccatcttggcaagggggatgtggcaggactacacggtaatggtggggagagggtcagcaggaaaacatgtgagcaaaggactctgtgtcataaataagtttaaggaaaggtgctgtgcctgtgatgtaaccaagcaagttatagagaaacgccacactttgagactaattcaggagtcctttatcagccggtgaccgagagatggctagtgctcaaaattctctcagccccgaagaaggggctagattttcttttatactttggtttagaggagggggaacctagctgtagcaatcttacagaagtaaagcaggcaaaaaaaaaagttaaaaagacaaatggttacaggaaaacaaacagttccaggtacagaggctttaaatccatcacaaggtgataggtgcgggggctctgggtgctatctgccagacacaaacgcgggggctttagggtactattaccccagtgaattcctggcaactgcagacatagcctgccacagtaccttatcagttaattgcactctttgatatgctgagagtcagcttgctcaagttaagtccttgaggaagggagtgggtaaggagcccttgaggtcttgcaaatgaaggagctaaatggagtccatccagctttctcagctaagagagagtattcatattaaaacaaggtatggtatcacacctggatgtgcacgtaggccagatttatgtttgactttacccaaacacctcagtgcagtaaagagcagtactgccaccagcatgtctcacctccagccgtaagacagttttctcctatcccagtaaatggaatgtacaatcaggttttctaccgagacattccattcccagggatgaggagcaggagacagaggctttcctcttatctcaagtgcaaagaggccttcctctttcactaatcctcctcagcatagaccctttacaggtgtcaggctgggggacggtaaggtctttcccttcccacgaggccacatctcaggctgtctcaggggggcaaaccttggacaatacccaggctttctcaggcagaggtccctgcggccttccgcagtgcattgtgtccctgggtactcgagactggagaatggcgatgacttttaccaagcatactgcctgcaaacacatgtttaccaaggcacatcctgcacagccctaactccattaaaccttgagtcaatacagcacgtttctgtgagcacagggttggggctagggttacagattaacaacatctcaaggcagaagaatttttcttagtacagatcaaaatggagtttcttatgtcttcctttttctacatagacacagtaacagtctgatctctttctttcccccacagatttataattttgagataccagtgatgggatgggccacattagatcctgaggcacaaggaaaaatacacgccccgtatacatgtttgcatgtttttttaaaatggttaattttttccaagtagtaacaacaactgctctttttgttttgttgtttgagacagggtctcactcttgacacccaggctggaaagcagtggctcgatcacagctcactgcaacctccacctcccaggtaaagccatcttccccctcagcctcccaagtagctggaactacaggcatgcaccaccacacccagctattttttttattattgtttttgtaaagacaggggcctcaccctgttgcccaggctggtcttgaactcctggactcaagcaatccttccaccttggcctctcaaagtgctgggattacaggtctgagccaccacactcggctgcactcggacttttgaaccataaaaactgtgagataagaaatgtgctttgtttcatacgcttgtggtaatttgttaacagcagctatagaaactaatgcagggagcaactgggcattgcctacactcacagtgggagtgtgaactggaagcaccaccagtgtctgttaaagccacaggtatggcctggcatggtgcctcatgcctataatccctgcactttgggaagctgaggcaggaggattgcttgagctcaggagttcaagaacagcctgggaaacataatgagtccctgtctctataaaaataattttttaaaaaattagccaagcatggtggggtggcatgtacgtgtagtcccagctactcgggaggctgaggtaggaggatctcttgagcccagatcaaggctgcagtgaaccacgttcacaccactgcactccagcctgggcaacagagtgagacctcttctcaaataaaagaaaaaaaaaagctgcaggtatgtctacctgtggcccagcaatgccacacccaacagaaattcacctgtatgtccccaaaagacacaacaatgagacacggctcattgcagccgctgatcagcaggcttctcaaatcccccatccctgttggagtggatgaagcagccgtggtgcgtccgcacaatgggatctcaccagtcattagaacaagagatccacaaccacacataaccaccactaggatgaatctcacaaacaactgggaggaaaaagcaagacacaaaagaacactcactgtgtgattccacttataggacgtttaaaaatcaagcaaaacccactgacaccaatagaagtcagggcggtggatgggtcgcagggagaagacaatggctgggaggggtatgaaagcttctgggagggccaggttgtgccctgtttcttgatgagaggaccagggacacggaatgtttgccaggtgagaattcattgggctgcacgcttatgatctatgcatttgtctatatatttcaataaaacatttacctaataataatgacctttattcattctctttcagccactgttaataataagtgccgagaccagctcagtcggggagaccctaacctagcggtgctagaggaattaaagacacacacacagaaatacaggggtgtggagtgggaaatcagggatctcacagccttcagagctgagagcctccaacagagatttacccacatatttattgacagcaaaccagtgataagcattgtttctacagattatagattaactatgtgtttggcaaagtgtattcactgggcagatcctggaatactgacacactgaaaaatactacagaaaaaactcctgatggagactctgattcagcttgtgtgacactaatattttcattttgggtggtgagcaaatgtctttcctcactcagagaagggctcagtatccctaaacagcatagctgagttatgactggcctaatttagagctgcaccaacttcatgtaccaaatagggacaccgctggcctctgtgcttccctctgactcgaatacaccagaactgggatcatttctgcaccctggaaactgacctagaggtcctcctttgtcacatgcactgtcattctgtctcccagaggggctcacgggttgactatgcctatgtggacaaagtggaatcagccctcagtggtcttctgtccatagacaacatcaaattctgtaattaaatctccgttggcatcaaacatgatctctgtcccatcaggggtcttgaaatgcacgttcttgagaggacgaagcagctggggaaggatggatgacactgtagatgggcagggccagtcccagggcctgtgcaaaatgcatcaggtcctcagccaccgtggtgagcaggggctgcctcaggcagggccaacgtatccatgaggcacgggagacccagggctgtgatatttgcagggtcccatgaaaatgttctaatgttaactgcttgtaaaagcaaagaaaaaaattaaaaagtaattaatgggccatgcacggtggctcaagcctgtggtcccagcactttgggaggccgaggcaggcagatcacgaggtcaggagctcaagaccagcctgaccaatatggtgaaatgccgtccctaccaaaaatacaaaaattagccaggcgtggtggctcacgcctgtaatcccagccactcaggaagctgaggcagaagagtcacttgaacccgggagacggaggttgcagtgagccaagatcatgccactacgctccagcctgggcgacagagcaagactctgtctcaaaaaaaagtaataatgaacatataataatgagtccaacccaggatatattcatctttagaccaaggcaatggtaaaattgaattaagaatttttttttccacggaggaaggaacgcacaaaagccacagtgtggcccctgctccagggattccgtctgagcaaacacttcctccttggccttcccatcacactccaagtggagtaaaatcctggcgggacctacacaggtcagtccctgaacacctagacatcctgatccctcagtcacaaacctagcatggacttaagacccctcatcctggccaggcatggtagcttatgcctgtgatcccaacacttaccccaaagtggacagatcgcttgagcccagaagtttgagaccagcctgggcatcatggtgaaaatacaaaaattagctgggcgtggtggtgcatgcttgtagtcccagctactcgggaggctgaaggatcgcttgagcccaggaggttgagactgcagtgagctgtgaatgcatcactgtattccagcttgaacaacaaagcaaggcactgtcttaacacaaaacaaaacaaaaaattcctcagcccggcacggtggctcatgcctgtaatcctagcactttgggaggccaaggtgggcaaatcatctgaggtcaggaattcaaaaccagcctgaccaacatggtgaaaccccatctctactaaaaatacaaaattagccaggcgtgatggcacatgcctataatcccagctactcagaaggctgaggcagaagaattgcttgaacccaggaggcagaggttgcagttagctgagatcacaccattgcactccagcctggacagagcgaaactccgtctcaaaaaaaaaaaaatcttcgtccagtgctcctgctaagatgtggcttagggctgtgaatacaagatatcctcactgaggagcactgcccctgtcctccccaccaggagaccaagtgagtttcctgctgtctccccttccctgaatcatctactccacagtttgtttttgagacaaggtcttactctgttgcccaggctggagtgcagtggcaccatcatggcttgctgtagcttcaacctcctgggctcaagcgatcctcacacctgagccttccaagtagttgtgactagaggcgtgcaccatcacgacttttttttttttaaagatagtctcgctctgtcacccaggctggagtgcagtggtgtaatctcggctcactgcaagctctgccctcccaggttgaaggaattctcctacctcagcctcctgagtagctgggactacaggcgcccaccatcacgcctggctaattttttgtatttttagcagagatggggtttcactgtgttagccaggatggtctcgagatctcctgacctcgtaatccacctgcctctgcctcccaaaatgtgggggttacaggcgtgagccactgtgcccagcccatgcttggctgatttaaaaatttttttgtagattcagtgtcttactgtgtttccctggctgatcttgaactcctgggctcgaatgatcctcccacattggtctcccaaagtactgggactacaggcgtgagccaccatgctcagccccactccacacgttcgcctctcaccagccagggctggaagtcccaggcatcggcacacccctggtccccatgcttgcagcctgccagggcctgggcgatggcatagaccactgtgtaggcgatgtgtactttgctttccttctggaaagggtagtgctcaaccctcagactctcatttcctgagcagaactggactcctgcagccgctgtgcttttccctgctggcccccagctgctatggggctatgtgcacttgaaggtgacctcccagaatctccatatgaacatgtcttctggggtcctggcaaggcgcagggaagtcggggggctggctgttgcaaagcaggaggctgaatgagccctgcagaacccagaaggcactggcacagtcaggaccagcgccatgtgcagagtgtcccagctgacacagacctggcccaggatgcctcggcctgccaggcactgcaggatgagtctgaagtgctagctgttaaggaaaaccaggatgatggtggccgtacagttctccatcagccagatgatgtttttcatcttcagggactcccgggtggggatgcagagttggaattcaatgcagaccccagcctggcccagctcctggacgaccagagacctgccctgcagctcaaagtcgtccccctgcgccaggacgctcacccaagaccatcggaagtgaagcatcagctgcaccactgcatgggtggtcgtgaggtgactgagcagggtctgaaagaaggatgggaactgggtcctgtcgctgaggctggccagtgtggaggaggggctgacctgtgcaggaagaggccagggcaatggggaggggtgaggagcagctcaggcacctgctgaccaccaggttcaaaagaaagccaggttgacccacacgtccctggtggccctgggtgtgtcccccaattttgtcactgaaagctcacacctataatcacagcactgagaggccaaggcgggcagatcacttgaggtcaggagttcaagaccagcctggccaacaacatagtgaaaccccatctctactaaaaatacaaaaattagccaggcatgatggtgggtgcctgtaatcccagctacttggtaggctgaggcaggagaatcgcttgaaccctggaggccgaggttgcagcgagccgaaatcgcaccactgcaccctagcctgggtgacagaatgagactccgtctcaaaaaaaaaaaaaaattcccacataagtctgggcatggtggctcacgtacatcccagggctttgggaggccaaggtgggaggactgctagagcccaggaggtcgagactagcttgggcaacacagtatgaccccctactctaaagagacacacacagaaagagagacacacacacagagagagagagagagagacagacacagagacacacagaggaagagacagacagagacagacagagacagagacagagagacagagtcagacagagaaacaggagggaaggcaggcaggaagggaagaagggagggagggagggagaggagggagggagggagggagggatggaggaggggagagagagcgagccaagcaggcacagaaaaaaaaaaaaaggagaaaaggaaaggaagaaagaaaaaggccagatgtggtggctcacacctgtaatcccagcaccttgggaggcagaagtgggcagatcacttgaggccaggctggtctcaaactcctgacctcacgtgatcggcctgcctcagcctcccagagtgctgggattacagttgtaagccgcagcacccagccccaaggaataattgaacttaatgttcattcctctcgttttgcccacttcaaacttacgtttctgctcctttgccaagctgggtttttgtttgttttttttgagacagggttttactgtcacccaggctagagtgcagtggcaggaacacagctcactacatcctccacctactgggctcaagagatcttcctgcctcaggggactacagatgtgcaccacccaccacccccagttaaaaaaaattattttgtagagatggggtctatgtttcccagcctggtcttaaaattcctgggctcacgtgatcctcctgcctcagcaggcctggggatccgattctagttccggtttgcacagcgccgacaactctggggctacaggctggagccaccgtgcggggcctgggattcggactctagttccggtttccacagcgtggacaactctggggttacaggctggagccaccatgccgggcctggggttcggattctagttacggttcacacagcgcggacggacagttcttcactggcagtggcaatgactcggaacctacttgtgttgtttggccacgctgtgatctttgtcagtttttgcctgcttgtcgatttgccaatgaagagactactcttcgtgccccggaagataaagttctatgaaatcggggtcaacgaggttttgtgtctgtgtttgcttctgacctgtggctgaggcacaggatgaaactgctcggtctctggggtctgttggatcagagactttaacacgctcctcgtgtgggtgcaaaacattctcctaccgccagagggtagtaaggaaataggctatgcaaaggttatggggtctgaacggaacggtgctctggtctgattggtttacacagacccataaggctgacgcaacaggtagagctaacagatttgaaaataaaaaaacaggatacccaattaagtttaaatttcagataaattcatctaatattttagcataagtatgtcttgtatgtcctgtgcaatatttgggaccaaattctactaaaaaggactattcattgtttatctgaaaaccaaatttcactgggggtactgttttatctggcaaccctacaggtacaggaaaacagcttcttgagctgcagtcaagaaatgcagttgcagctgcacgcagtggctcatgcctgtaaacccaacactgggaggctgaggtggatcacaagcccaggagttgcaggccagcctgggcaacacagggagagttttgttttgttttgttttgttttgttttaaaaaaggccaggcgcagtgtctcacgcctgtaattccagcactttgggaggctgaggcgggtggatcacctgaggtcaggagtttgagaccagactgggcaacatagtgaaaccccatctctactaaaaatacaaaaattagccggtcatggcggcgggcacctgtggtcccagctacttgggaggctgagacaggagaattgcttgaacccagggggcagaggttgcagtgagccgagatcgcaccaccgcactccagcctgggcgacaagagtcagacttcgtctcaaaaaaattcaaaaaggaaaaaaaaaattgagtctctaatcctttaaatgtgcttgaattaaaaggaaagaaaagaaagtctacatatagaaacttctagttcagaagcattttatgtaagaatccaagtgggaagtaatcaaggtgaattcttggaaaaaaatcagcctggcttgatactttggggttaaaagcacctagaatagctatgcggttatttgcagaggttctatagaaatcaactctcctttttatcaggataggactggactaaattgatcgtacgatcaagcccatacctgaagtgtcacacctcagaataaactccccaatacatgacaacccaccctgaaggagtaaggggtgaaggggtgagctttctttgtggccccaacattcacaccgccccaggaaaacccttccaacctgttctgtgatttacagggccccctgcttcacaggtaggaaggcaggcctctcccccagcaggccagcaaactttgcaaatttaaggcgttcaagggcagaggaatcctgtaaacccaaatttacaggtttctcagtggaacatgaatctattaaattggactcgtcatacaatgctggtgggaatgtaaaatggtgcgctgctttggaaaacactccagcagctcctcagatagttaatcatagcatgaacatttggcccagaaattctacccatacaaccaagagaattgaaaacacactgaacatacacacaaaaacggatacataaatgttcatagcagccctattcacagtaggcccaaaatggaaacagttcaaatatacatcaactaataaatggatacacacgacatgctctattcatacaacggatttttaagacagggtcttgcactgttgcccaagctggattatagtggtacgattatagctcactgcacccttgacccaccccccccgccccccgactcaagtgattctcctgcctcagccttctgagtacccaggactacagctgcatgccactaatttttttttttttttcctgtagaaatggagtctccctatgttgcccaggctggtcttgacctcttgacatcaagcaatcctcccaccttggcctcccacagggccactatacccagcctatgatggaaaattaatcaatagaagggaacgacgctctgacacaggctgcaacgtggatgaaccttgaaaatatatttagtgagaaaagccagtcacaaaggaccacacagcgtatgattccgtttataggaagtatccagaaaaagcaaatctgtacagacaaaacatacattagtggttgccggcaggtggagctgatggaaactgctggctaaaggggttggggtttccttgtggggtgatgaaaatgttctcaaattggctgtggggatggctacacaactcgaacataccaaaagccatgagtgagttacgcggtatgtggattatatctcaggccggaggactgcttgagcctagcaaatcgaggctgcagtgagccgtgatcatgccactgcactccagcctgagcgacagagaccccatcactaaaaaaattaaaatgccccagcacagtggctcacacctgtgatcccagcacttcgtggggccgaggtgggcagatcacctaaggacagaagttccagaccatcctggccaacgtggggaaacaccgtctctactaaaaatacaaaaattagccgggaggtggtagggggcgcctggaaacccagctactcgggaggctgaggcaggagaatcgcttgaacccgggaggcggagattgcagtgagctgagatcgtgccactgcactccaccctgggaaacagcaagactccatctcaatacacccacatacatacataaaataaacagaaaaaaaaagttgcctctagacatagctactattatgggaatgacacccgagggcctgagagtcaggaggccccagcggggcggggccgtgtggaggctggcggcacaagccctatggcctggactcaaaacccagcttcagcgccccagtgctgggtgagctgcaacgtgtcactgctagttccctcaatctcagtgtcctggtgaatgcagcagcgatcaccattctcttacagagaggtcatggtgagggggaggatggcgtcaggctgtagggcattggcggggagccaggaccctccgtggtagggcctcagcgtcacccccattgtggccaataccacagcaaatattaggggagggtacggctctgagtacttacctggagaaacctgtagagtcccaggagcctggccattggcatagacaacgccaagcatgtttctccaaagcagctccgagagcgctgggcccagacgtgtagctggggatgggctcctcctgcccggtgagaaagctcatggtctcatggagtgctgcgtgcacgaagtccccctgtgtccagaattggttccttccagtgggttcttggtgtagctgacttcaacaatgaagctgcggaccctcacggcgagtgttactacagttcttatctggagttgttcattcctcccgttggattcgtggtcttgctggcttcagaagtgaagccacagaccttcgcagttagtataacagctcataaaggtagtatagacccacagaaagagcatcagcaggatttatcgcaaacagcaaaacaacaaacttccacaaactggaaggaaagcccaacagactgccaccgccggctcgggtggcctgcttttattcccttatctggccccacccacatcctgctgattggtccattttacagagcactgattggtccgttttacagagagctgattggtccgttttgattgagtgctgattggtgcgtttacaaacctttagctagacacagagtgctgattggtgcacttacaatcctttagctagacagaaaagttctccaagtcaccaccctacctggaagcccaaccggtttcacctctcacccagagttccggatggagaagcccagcctgaggctggggagcaggtgggcgtccctgttgatctcctccatggcaaatgtgaatccttgggcttcccagtagccccaggtggaaacgctgagggaaggagaagcccaggcttaccgcatgctgtagctgcagaggctatggcttatgcacactcaaaggggatgaggccacaagtctccacaagcgcttgtgcacgatgtagcctatacatcagacttgacataactacatcttagcaaaagactccattttatatttcataggacactctgccatcaaggataggatgttctgtttattaaacaacaaaaaaaaaagactgcacctaaccaggtaaggacacaagcacactcttccactgccagttctcaccaggggactactaggtgactataaaagattaggccttctcgggcacggtggctcatgcctgtaatcccagcactttgggaggtcaaggcaggaggatcacttgaggtcaggagttcaaaatcagcctggccaatgtagtgaaaccccatctctaataaaaatacaaaaaaattagccgggcatggtggtgtgcacctgtaatcccagctactcgggaggctgaggcaggagaatcacaagaacccgggaggcagaggttgcagtgagccgagatcgtgccattgcacaccagcccgggtgacagagcaaaactcttgtcttaaaaaataataataaaagaaaaagaaaattaggccttcaggagctcaaaatggctgttttaactgacactgttttgcagtcactcatgataactcagcctctgtggccaaaggctctgccacctcaaagacttccttgcaggatggcagaccaccgacctcacagaccacccacccaccgcctggcccagaccaggatgccttttgtcttcttcgctgcctctgaactggttccttaactctttctcctatctcttttttctcttgatgttaaatgtcactttgttggttgtggaatgtttaacctataacatttctatattaagtatactattatgtatggtttgcaatattaactgcttgtggagtggcttgagcctccgtgcctgtggctctgactaccaagtgaatgagaagcacaagggataattggctccttgggaactccatgtagctcatggcttttgtgattgaaataacatcagtaggccgggtgcggtggctcacgcctgtaatcccagcactttaggaggccaagacgggcggatcacctgaggtcaggagttcgagacaagcctggccaacatggtgaaaccccgtctctactaaaaattcaaaaattagctgagcatggtggagggtacctgtaatcccagctactcagaaggctgaggcaagagaatcgcttgaacctgggaggtggaggttgcagtgagcaaagatcacaccatcgcactccagcctgggggcaagagcgagactttgtctcaaaaaaaggaaaagaaaagaaaagaaataacatcagtaaacacttgacattgcggaaagacacgaacgtgtggacctggttatctctgaccttgcactgatcatgacatgtgcatagcaaaatgggcagaacagccaaaaaggggtggggggcggggggtaggacatgttggtcaaagggctccaagtttcagttagacaaggaggaataggtttccagatctattgcacagcatggaaactgtagttatcaataattaatgtatatttcaaaactgcaaaaagatcatatcttaaatgttcacattgcaaaaaatgataaggatgtgaggatatggatatgttgattagcccaatttaatcattccataatgtatacatatatcaagacatcatattgtaccccataaatatatacaattattattcattgattagaaaaaataacctggcaacatcaagtgatggcaagtggagtgattggaagtcttgtgtatgtctggtgagaatgcagaatgaaatggttgctttggaaaacattgtggcaatgtttaaataaaggtaaacaggccagccatggtggctctagcctgtagtcccagcactttgggaggctgaggcgggaggattgtttgaacccaggagttagaaaccagcctaggtcacaacgtgagactctgtctctatagaaaatgaaaagtaaataaaaaattaaaaaattagccgagtctggtctcatgcatctgtggtgccagctactcagaagctgaggtgggaggatcacttgagctgggaggtcaaggctgtagtgagctatgattgagccactgcactccagcctgggcagcagagccagaccctgtctccaaaaataaaataaagtaaaatgataaacatattcattttttaaaaaagaaaaaaatcaccggagggactatgtgaagaactgtccgcagagacagtttgggaacctgggacagaaatgggtgatggcacacacaggtaaagagaaattccctgggctgatcaactcatgaagagatttgttcattccacaaacacttgttcattcaacaaacacacttacctgtgcctggcgctgctctaagcgccaagggttggcggtggacaagagaggggagaatctctgcctcacctgtgcagtcgctgcagcacaatgaggagacaagcaacccatgcttcagacacagacagaaagcaagaaggaaaaacggagtgaggtgctaaggcagggccggtgagacaggctgaccagcatccagacagacaggatgagtcccggccatccaggagggattctgagaatcagctgctgcctgaggctttagaaggacactcctgaaggtgcccagccttcaggggctctccaccaaacaccctggtagctgcttaccttgaagactccaagccagctggtggagcagtgaaatcaaacagggtgatgttgtacaggtggaagatggagaagctggccctgaccaccacatcccctggacagtcaaagcgggggctcttccctggcaaccgccagcctattgggccagaaacagcagccccagagagagatcccacaagggcgggaagcagagagcacagcaacatgtctgtggtgtgctgacagccagcaacggcagcccccgtgtgggctgcttccaacagtgatggggggctttcatctgggagctcacccctcaatccaggacctgggggctggggacacagatggagctccaggcatccaggccctgggagaacagtggccactcagtcccagggccattaaaacttgtacttcctcctcctgtggtttctttgtctctgcccaggccaggggtaacagcccccaggcctcatctgcagacttcagagagggaggttgatgagtcctgactgtgtcctcagggactctgcaaacccaggagcagctgcacttagggtccccaggtcactggttttggagaggcccaaggagggtacaagaggcgaagactctcctgagccctcctgcctcagttggcagtgtttggagatagggacatccccagagcttcagtggccctgggttaacacctcctgcctgggggctcccagagggtcccaggcaagggtaaagcatgttcagcccccagagggctggcccaggctaagctggtgcgtttctgtggtcaggaagtccagttccaggcggagggtggagggtaggctgcaaagtgactccctaacatagtgcttacaaccccaggagatgcggctgtgaggcaggaaaatagagggaattggaggttaaataaagggcaaactgagtaaaagcagaagcaaggtgaagggacaggtaagcaaaaagcaaaatatgggcaggtgcagtggctcatgccataatcccagcatattgggaggcgggggcaggcagatcacccgaggtcaggagttcaagaccagcctggccaacatggtgaaacctcatctctactaaaaatacaaaaattagccaggcatagtagcacacgcctgtagtcccagctactcaggaggctgaggcaggaaaatgacttgaagctgggaggtggaggttgctgtgagccgagatcaccccactgcactctagcctgggcaacacagcaagactccatctcagaaaaaaaaaaaaaaaaaaaattccagaccttatcactttggagaaaataccacactaaaaagtgaactgaggaggctgggcgtggtggctaacgcctgtaatcccagcgctctgagaggccgaggcgggcggatcacgaggtcaagagatcgagaccatcctggccagcatggtgaaatcccatctctactaaaaatacaaaaattagctgggcgtggtggcacatgcctgtagtcccagctacttgggaggttgaggcaggagaattgcttgaacctgggaggcagaggttgcagtgagccaaggtcgtgccactgtactctagcctgggtgacagagcaagacttagtctccaaaacaaacaaacaaacaaacaaaacaacaacaacaacaacaaaaaacctcaccacgttcttgatttgtgtgtccctgatcactaactagtcagatgggacttttcttcacattggttagccccatgtatgtaagagggtagtatctttctaagcttggggtaggcttggtgagctttttttttccttttttatcttttttcttttcagagatgaggtctcactctgtcgcccaggctggcaaactcctgggatcaagcaatcctcccacctcagcctcccaagtagctgggactacaggcatgtgccaccatgccaggctaatgtttaaattttttgtagagatggggcccagttccatctggagttgatttttgagtgtaagggggtgacattcggtcttccttagaaaggttcaaagaggggtccttcaaactgggattctaggtcttctcccatagcttcaactcaaacagttctgcatttttttttagacatgaggtctcactctgtcacccaggctggagtgcagtggcaatgcatcatagctcactgcagccttgaactcctgagctcaagtcatcctcctgactcagcctcccgaggagctgagactacagaaatagccaccatgcctggctgatttttctatttttttgtagagacggggtttcgccatgttgcccaggctggtctcaaactcccgggtttaagggatcctcccaccttggccccacaaaatgctgggattacaggtgtgagccattgcacctggccaaaataacatttttattgagatataattcacacagcataaaattcacccttcttttttttttttttttttttttgaaatggagtctcactctgtcgcccagtctggagtgcaatggcacaatctccacccactcacccactgcaacctctgcctcccaggttcaagcaatttgcttgcctcagcctccagagtagctgggattacaggtacccaccaccatgctcagctaattttttaaattttttggtaaagacggggtttcactatgttggccaggctggtcttgaactcctgacctcaagtgatctgcccacctcagcctcccaaagtgcttggattacagacgtgagtgactgtacccagccgaaccttttacagttcagtagtttttggtacattctccagattgtgcgatcatcactggaatctaattccagcatcttttcatcgcccccaaaagaattccccttgccccttcttctagcccctggcacccataacagttctgcttttagctgatttacttttaattgggatttcgagtaagatttaatttgggacaaagatttctactgcttaaaaaaattttggtccgggtacggtggctcatgcctgtaatcccagcactttaggaggccgaggcaggtggatcacctgaggtcaggagttcaagaccagcctggccaacatggtaaaaccccgtctctactaaaaatacaaaaaaattagctgaatgtggtggtgggcacctgtaatctcagctactctggaggcttaggcaggagaatcacttgaacccgagaggtggaggttgcagtgagccaagatcacgcctttgcactccagcctgggcaacaagagcaagactctttttaaaaaaaacaaaacaaacaaacaaaaaaaaactgaaacctctgctagacaccaggctgcctcccaatggatctagagttaccaggtggcctatgatggtgtctagatccagactctagagacagactaagtcagtgttctctcaagggagatttcccaaatgggtggcagttataaatgcacacatgagccttcactgccccaaagggccacgccaatttcagctaccaagaaaatgaaccatgtcattacaagtgcctaattttcaagaaggagaataataagcccttagcaccctaatttggttttcccatagtggtttctgcacaaagtggcattcacacacaacattccagggaccagccgccagcagcaaagatgcggagacacggctctgattatccagctgaggcagcccctcccctccctgccactcctgggactcttaatctccaggcctcgttttattttattctaggtatttatatttccatgaagcatctgctttgtttactggtgtttgccccatgaacatgggcttccaagggactaaagccctatcagtccctctcactgatgtgctcccaccccagtgtccagaacagtgcctggtacacataggccctcaataaacagctgtccagcagatgctggaccccctggaggtgggtcctcctctcttttcttagctcacactctcctgcttcttcttcagcaatgagcagcttcagctatcctgagctcagtcccagagctgaggaccctccttgcatcatgatctcacccccacctgatttcagatacaaaacgagtatctgtggaaccctactattctggcacatggttacattgtagacattaatattaaaacttatttatatgaaatgttcttatgtaaggtttcgttaaagtatatgaaatataggacacattgatactaattccttgtttttctttttctttctttctttttttttttttttttttttttttgagacagagtctcactctgttgcccaggcaaggctggagtgcgttggcaggtctcggctcactgcaacctcggcttccccagttccagcgattctcctacctcagcctcccgagtagctgggattacaggcacgcaccaccatgcctggctaatttttgtatttttagtagagacggggtttcaccatgttggccaggctggtctgaaacacccgacctcaggtgatccgcctgcctcggcctcccgagttctgggattacaggcgtgagctatcgcgcccggcctccttgtttttcttgagtttacatataactgaggtttcttttttctttcttttttttgggggtggggggacggagtctcgctctgtcacccacgctggaaaactggagtgcaatggagcaatctcggctcactgcaacctccgcctccccggttccagtgattctcctgtctcagcctcctgagaaactgggattacaggcatgcgccaccacgcccaggtaatttttgtatttttagtagagacgggggtttcaccatattggtcaggctggtctcgaactcatgacctcgtgatccgcctgccttggcctcccaaagtgctgggattacaggcgtgtcaccgcgcccggccgacgtcctgtatttttatttgctaagagtggcgatcctagtctgggacatacttgtactaaacatatttatattaaaaacaatgttttaacatactactcttggacactgtataaaacggttgcgtgtctggaatgccgtcgttttgccccgcggccccatcgtacatgcgcatccccgcagccgccaccgtctccactttccgcagcagcgtccctgacgctgcgcgacccgttgccaaggcgactggaaccgcggcccgaggtaactggagggcacggcgggggcggggcgctcatcccaggcggcttctgattggcctcggccgcctcgtgcgtcacagccccgcccctgcccgggagtcccgcagcggtgacttgtcaccgacgcccggcgtgatccagcggaccaatggcggccgcccgcggcgcgcagggtgcggggatggggtccgcccgcggcgttgggcgcgctcgccagcccaggggtcgccatgaccgagtggcccaggcccgagcgaagcccgcgcgcggtgagtccgccgcggcccatccgtccctccgcccgccagagcgtccatcgggacgcccacccgggagggtctcggcgccgcgtcggcgggagctggcccgggatcgcggtccaggggcgcgcgtcgggggaggcgggcccgggcccgggagggggcgggccgggccggggttccagagcccatcgggagtcctgaggtcgccgtaggggagggaaggggaaggctagaggccacgcggggcggggactgggggggctggggccgccccttccgcagggaccccgacccctgttggcatccgcctgtccgtttgaggccgaagcccctctacgtacccccattgcccgcccaaacaccgctcggccgcgtccaagttctcccttccacacctgatcagcatcccgggacctatctccctcctgaacagccgcccccggacccatctccctccctacccggccccttgggcccatcccccactggaacagcagcccccgacccgtctctctccctacaagctccccctccccgccccaggcccatctccctcctgaacagccgcccccgacccatcccccacccaatcaccccaccatcctccccccaaccagccgtccacagccgtcgtcgctgcccctcccctgtattcccagtgcgctgcccttgcacacttccccagctcgtttattatggaactcctccgtgtggcatcctaagctcccaacgccctccccactgtaagcccccttctcaaagccagaaccattcactgactggcgcagtgaacacgtcttctatgtcactaagcatccggcatcagcggcaaagcccttctgcccatccccgcaatagaatttggggctcgggctgcagatctcagtgcccatgccaggtgaacctggcccttccacaggcactgagccctccaagtgacactctctcacacacacacatccccaacattaatcagagacccctaccaaagtagacttctaggaccccagggccaccacagcattgcccatgggggggcccagatcctcctcaccagccatgtagacctcagtccccttcacatcatcccaggccctcttcatcttccagaaacagccacccatcagtccaggactctcatcagctcaggtacccccacattggcctaggtgttccacatcagcccccatatagaccccagacacacccatggacctctggtgccttctgctaagacctcctctttaccctcatccctgataaacttagcatctcctcccacagacctcagcccaggaccctggaggatgctgaggggctacagcccccctccctagagtctccagggtgagctgccatgagcacctgagagagtataaggtctgaggccccagggcaaagggatttcttgaacctgtggagcttcaaaataggcccttttttcttattcaaaactacatatataaaagtgtgaatacaacataagagagcatttttgcctgtggccttggcagggaagaccaagctggtagtttcccaatcagggtgcaggtggccgggtacgctgactcgaagatggctggctgggcacagtccccgtgagttgcctttctgccaccctgcacctctcctttctcctggattgtaaaaccagatgcacgagaactgcagagtgtatgaaaaatgcagcagaggatgaagagggaaaaatcccatggaatccctccttttcacttgtcataagcatttcccatatggtcaaaaatccttcctaaagatgtcttgttttgttttgtttttccatgttgatgaaggtcacatgggagcccgacaccatttggaggagattcagagaagtatgaacagcacaaagcacttggccgccccccatgggcgtcttcccaggactccctttctatgacactcacgcatcatcctgcatcccacgttccctgtgcctcatgtcatctgtacatcatgtgtctactccccgtggtcatgtcatagtgttgtgtactgggcacggttgaatactcccatcacatgatgggggaggtagttgatcccaccacgttcaactgttgggcacttttgtagtgaatcttggtgcctgaatctcgcatcttgcacgcagtctaccaagtgttcttgatatataaatggccacagtgctttccagaaaggtcgtgccaatttatattctcaccagcggatcagtccagagtacaattgttaaagacaaacaaacgaaacctccctgcttatttttatttttacaacttttaatgttttcttcagttatatgttcaccatagtcggcttggaaaatgtacaaaaggtaacttcttttttttcttttcttttttttttttttttttgagacagagtcttactctgtcgctcaggctggagtgcagtggcacagtctcagctcactgcaatctccgcctcctgggttcaagcatttctcctgtctcagcctcccgagtagctgggattacaggtgcgtgccaccacgcccaactcatttttggttatttattttttttgggatggaatctcacgctgtcactcaggctggagtacagtggtgcgatcttggcttactgcaacctctgtttcctgggttggagcaattctcctgcctcagcctcccacgtagctgggattagaggtgtgcaccaccacgccggctaatttttgtatttttagtagacggggtttcgccatgtcggtcaggctggtcttgaactgctgacttcaggtgatccacccacccgggcctcccaaagtgctgggattacaggtgtgagccacggcacccggccacaaaaggttattttaaaattactcttcccactttccctctcttttcagagtctccagtctcccttgccctcttcctggtctccacccccagcttggacctggtaggaaagtcaggaagacagcaaagataacaccatgggtagacctgctgctggtggtggtgtcatccattattatgtagcccacctggctgcttccatttaaatggaatttaaatttaaaattcagttcctatttcaggtgctcctagccacacgtaggtggttgcatgggtagagaatctttacatccctgtaggaacttcactgggcagtgctggccacaccacggggcaggcattcttgttcccgcagctcgtcagtcaatgtgtgttgaatgactaaatgagagggagatagacactaagtaaggggaaaagttgtgttcagaaagtcatggaggttatgaagacagtgccataaggatgatggccaggacatctgcgaggggaggagctggggtgggaaggggaggggctggggtgggatggcaggtgcaaaggtcctggggcagccagtggcttgaactcagtgcaaagtagcctgtgagaggcatgtggaagattaggtcagaaggtgggaagaggtcaggttggttccttggggtgctggaggtcagaacaaggaagtaaggagccgaggggcatcctgagtacagagggccaccatctgatgtgacccctctgtccctgcccctctctgcaggcccctgattgctgattctgtccgcctgccacaccggctctgtccggagccactgggactcgggatccagtccacacacacccctcagaggggcactgtggccagagaaatgcttccacggcccaaagcccctgcctcccccagacgcccccagaccccaaccccgagtgagcaggacgcagaccctgggccagcaagccccagggacaccgaagcccagcgtctgcgcttccggcagttccagtaccacgtggcgagcgggccgcacctcgcgctgggccagctctggacgctgtgccgccagtggctgaggcccgaggcgcgctccaaggagcagatgctggagctgctggtgctggagcagttcctgggcgcgctgcccagcaagatgcggacctgggtgcagtcacagggcccccgaagctgcagggaggccgccagcctggtggaggacctcacacagatgtgccagcaggaaggtgagaggcgcaggcttcctgccccgggccgggccagggggcctgacgtctccgaggaccgaactgccctccttcccgcccacatcgctcccacccctgcccggcccctcccgaccagcaaacctctcctgccccgcggctgtgtttttaattatttttacatataaatgtgctgcacgcctcatctgcctcgaatttctcactcagtcggtgattaaagatccctccatttcccatgcgtccatctgtcctgtggctttgtgtctgctgctcctcacggctgctctctgggaaggacgctgcctcgccacttcctcccagccacctgcagcgcctcctgcaacactcaggaatcctagagatccttaagccttcacagggcgcaggccccatcgctggctgatggtggggagagacgcttaggtctgcatcccgactctgggagctgggaaatttggggttgaaactgggctccctccctgtctcctctctcagctcccctctcccctgacagggctttgtccttctgcatctttgcccctgtgaccccacgtcgagattccatccacccagggcccagtcccatgagtggggctctttctttcctagtgacaaaagtgcagggattggacactgggaggccaaaagaggcagccacggatggtgagagcagtcgtggcactgtggcctcgggagggcttccccagcagggccccagcaaggagggtgccaggcagccacgctgcaggagcaaaggctgggagtgagaagggttgcatcagagctcacagaaaagaggggtggagcaagggagaggaacaggccctccctttgcaccctcccactacagcatttccgtagaccaacagtgataagcagtttgcagaacacagggtccagggtccccttactgccccagggcagccggtgccacacttaggaaagctgtgacagctgagctttccagaggctcaagggtagccctgtaagctgcaaggcagaagccagatgaattggccctttgaactctctgatcctggggtagagggcccaagagcactggcttctggcgctctgtggacctcacagccatcccagcccagagccacccttgctagttttaatgttccatggtcactctcaaaattcaacgtttttgagcaaagggctctctatctgtcttccatagcggtggtctgctttctacattccatattttgagcctatgaaacagtagagcaagtataatgaacagccctgcaccggccacccacccttatcaaagcccaacctaggaaatgctttgtaatctcagcactttgggaggccaaggcaggcggatcacaaggcaggagttcgagactagcctggccaacatggtgaaactccgtctctactaaaaatacaaaaattagccgggcgtggtggcgcgtgcctatattatatcccagctactcaggaagctgaggcaggagaatcgcttgaacccaggaggcggagcttgcagtgagccaagatcacgccactgcactgcagcctgggcgacagagcgagactccgtctcaaaaaaaaaaaaaaaaaaaaaaggaacaaccagtggaatcagctgaacccccatgcacgtctcctagtcctgttgtcccccgctctgcctgacaccccagaggtggccgtgatcttgaatttttctttttttaattaaaaaataaataggggggggtcttgctgtgttgcccaggctgctctcaaactcttgggctcaagcagtcctcctgcctcagcctcccaaagtgctgggattactggtgtgagccaccacgcctggcctggttcccacgtcttgacccttctgtcaatggtgtcctgaaccctgcttcagcagtcgtcctctgtgcactctgtgcacacagccccggggggcttggggagcagagggctcacagtgctcgggcctccctagttagtcagtgctgcagtgtgtgtcctcgtgggcttctggaggcgcacaggggtgtggagtatgagtgaagagggtacttgtcttcagcggccctcggtgtcaccacaggttcctgcccagcagccacatggagggacagaatgacagccctgcagccactcttgcctgcgcctcaggggtgctgcagggatgttcggggaaagtctgccctccccagaaggcctggagaattgggggctctgggaagaacaggcccctctcacgatccctttctcccgcacagttctggtatctctggactcggtcgaaccccaggactggagtttcggtgaggaggaagatgggaagagtccaaggtcccagaaagaaccatcgcaggtgagcccggggcccccagctccgtgctcctgcaccccagggcatgcgtgccgcttctgggacggcctcaaggatgccccatccaaggactgtgtgaggttgtccccagcgctcccaggaagcccggcctccaaactccccgcctgccccacagattccccaagcttcctggggctcagtgctgggcgagggcagtcagtgcagctgtgtgtttgctgtgtgcctctgggcctcaccccagcccctcctgtcctttcccagcctcgcagttaagacccatcctcctgtgtcacccgcaccagatgctgcgtgtgttgagaaagtcctgctgccccgatcatcttccctcagtgaacccaggattctgggcgggcccagaaggaaatgctgagggctcccctgcagctagacctgctgttgcgcaggcctcaaggcgacgggaggggcccggctcggttgggagccaagcggatctctgtgtggctggagagattaaaatcaggggtggggacacgcagacacatgagagaaatccaggggtaatgggtaaatcacaaaagaacaaaagtaagaactgctaagtgagtagcatgtgttcgtatgatcagggctactgagtttgaccactttctgcctctggatcttggtattggagccgccaagggaaacacagcacggtcgaacaatgaatggagcaaggttttgctcacagaccagagaccgggccagagcaccatctgcccatgtggctgtcaggccggggccagcaggtccctcctagaggggtcctgacctaacagtggggctgtctaggtgccacgtgaagcacacgcctgagcagaacaaaggggcacacattgggaaacagagacctccacacgaggcactacacccagcacaaactggggggaccccttatctcttggtaaggagatgttctaggcccaggacccactctcaggcagccaagtaacaggctgaaagactgcacatgtgtgtctcccactggcttagtccgttctgggtgctgtaacaaaatacggctgggtgtggtggctcatcccggtaatcccagcactttgagtgaggcctcacgggaggctgaggtgggaggaccacttggtcccaggagttcaagagcagcctgggcaacatggcaagaccccatgtcttaaaaaaaaatgagccaggtgtaggggtgtgcacctgtagtcttagcaactctggaggctgaggtaggaggatcacttgagcccaggagttcaaggctgtagtaagctatgatcatgtttctacactccagcctggatgacagagtgagaccctaactcaaaaaacatcaacagccgggcacagtggctcacgcatgtaatcccagcactttgggaggctgaggcaggcggatcacaagttcaggagttcaaggaagaaggaagtaacttgtggaatgctgagaaaggtaaaaacaccttcaaataaggaagaggaacaggctatgacctaatgcttgcttggaccagtataggcacaccagggcaaatatttaggctaaattgtgggagctaagaacataaagtacattgattttttttattatggctagcagatatataagaatgttagcacaggtctttgaataaattttgcttctaagagaagttactatttattcctaattagatggggaggaaagtctttgaagaggaacttctactttacttttttttttttttaatggagtcttgctctgtagcccaggctggagtgcagtggcgcgatctcggctcactgcaagctctgcctcccgggttcacgccattctcctgcctcagcctccggagtagctgggactacaggcgcccgccacctccccggctaattttttttgtatttttagtagagacggggtttcaccgtgttcaccaggatggtctcgatctcctgacctcgtgatccacccgcctcggcctcctgaagtgcgtgagccatcgcgcccggccctaaaatagatttaaagatcatcatgagagcccctctcctgcaccaaaacaaagtttcgtgggccgtggtttctgtttctgcatctaacggaggcatctaacctgggtagaccacagttgttggccacgggcttcctcagccgctgccggcagatgtgcttatctgactccctctcccatcccagacgccacgtggaaaccacagccgcgctcacaggccatcccctcaccacacggcaactccaaggactctctttttgcgggggtcgtaggtggggaaggctgctgaggtcctcccacccctctcccaccagggccgctgtggctgagaggatcctcgttggcgctggtttaggctgtggggctcagccacagcagggtgccccaacgtccctgagcgagctgcacttgtggagggagaggccttaggcctgaggcctggcgcccgcgtggagagacggcagctccgggatcggggcgctggtgagcgcggccccaggcattgccgctgccagggtgctaacactgcctgaggcacctctgcttttgaagtcgccggggattagcgggagcgtaggtgagggacaggtggagctgctctgcgcggggcagcccggctcgccaggaggcgctgtggagtgggcacgactggcgatcgctgagcgcatacaaccgcctaccatcggaagccttttgagaaatgcttccttaggcggtttcgtcaccgtgcatacatcgcagagggcactcacacacctacacgcacagcccatggctcctaggctacagacctgcacagcacggggctgcactgaatactgtgggcaacggtaacacaatgttgtttgtggatttaaacatagaaaaggtacagtaaaaatacaaaatagaagataaaaaacagtacacttgtataaagcacttgccaggaagggagcttgtgagactggaagttgctctgggtgagtctgagtggtgagtgaatgtgaaggcctgggaggttattgtgctgtggacttcataaacatggtgcacttaggctactaaattggcaactatatttccttcttcaatataatttatcttactgtaagtttttgctttacattttttttttctttcttagactgactctcactctgtcacccaggctggagtgcagtggcacgatcatggctcaccgcaacctcaaccttctgggctcatgcgatcttcctacctgagtcttctgagtagctgggaacacaggcacacattaccgcaccggctaatttttatatgttttaaaatttttttagtttttgtgtagatggggtttcactatgttgcccaggctggtctcaaactcctaggctcaagcgatcctccctcctcagccacccaaagtgctggaattacaggcgtgagccactgtgcctggcgtaaaaaactttctgactcttggggccgggcgcggtggctcacgcctgtaatcccagcactttgggaggccgcggcgggcggatcactagaggtcaggccttcgagaccagcgtggccaacatggtggaacctcgtctctactaaaaatacaaaaaaatagctgggcgtggtggtgtgcacctgtaagtccagctactccggaagctgaggcaggagaatcgcttggatccaggaggcggaggctgcagtgagccgagatcacgccattgcactccagcccgagcaacaggagcgaaactccgtctcaaaacaaaacaaaacaaaaaacaacctgtgtcattttaaaataaataaatgatacatcattatcccacagaaaggttatgctctgggggcagcagaaataaaagctttgttttaaagaagcggaagaaggattaaacctttttaaaaaccaaaaacatcgaagctgggcgcctcctgtccgaggccaaccgctgccgtcaaccgtccgcacggacggcgcctgaggagccaccgagacggcgaagagccgcggccgccgcggagaaggaggaggagccagcgcaggaggcccgagcggccgccacgcccggacacacggcgtccatcttaatgaggagctgccgcggctgggcgcccgccagcctcccgccgccgcctcgggtcaccgccccgcggggtagtccgggggatcctgctcatctcagcttgccagcaccctggggttgaggagctgcccgaaagtttcatttggctgctgcactcccacccaccctgcctacccgtgcttcagaggcgatcacctcagctgttggactctgaggcccgagtgccttcgcaccgtgtcgagagcgccatggacctccacctctgtgggttttgtggtcctggggcctcggtgccttcctgcccgcggctggcactcttcgcgccctgttggtgatgactcggtagtagagaagtccctcaagtccttgaaggacaagaacaagaagctggaggaaggcggccctgtgtacagcgcccccgcagagatggtggtgaagtcccgggggcagagagggtgctgggcgagctgaggcactactaccatggcttccgcctgctacggatccacaccaagatcgcagcacgcatgctctggcgcatcctcaactgccacaccctgacccgccaggcgcgcaggcagttgctccggttctgtgccgacctcttccgcctggtgccgttcctcctgttcgtggtggtgccgttcgtggagtttctgctgcctgttgctgtgaaactcttccccaacatgttgccatccacatccgagactcagtccatcaaggagaagaggctgaaggagcttcaggtcaagctggagctagccgagttcctccaggacaccatccaggagatggccttgaagaacgaggcagccaagggcagtgccaccaaagacttctctgtgtttttccagaagatccgggagacgggggagaggcccagcaatgaggaaatcatgggtttttccaaattatttgaggatgagctgacccttgacaacctgacacggccgcagctggtggccctgtgcaagctgctggagctacagcttcctgcgcttccagctcacgatgcggctgcgctccataaaggcagaggacaagctgtttgctgaggaaggggtggacagcctgaacgtcaaggagctgcaggcggcatgtcgggcacgaggcatgcgggccctgggcgtcagggaaaaccacctgaggggccagctgaagcagtggctggacctgcacctgcatcaggagatccccacatcgctgctcatcctgtcccggaccatgtagctcccggacaccctcttgccagccgaccagctcaagtccacactgcagactctcccagagattgtggcaaaggaagcacaggtgaaagtggccgaggtggagggcaagcaggtggacaaggccaagctagaggccacactgcaggagaaggcgaccatgcagtaggagcaccgcgagaaggagctgcagaagcattcggaggtggcgaaggatgttgaacccgaatgtgtggaaggcgctccccaaaggccaggggcccagccccagccagaagtgcctgacactgtcctgcagtcagagaccatgaaggacactgcccccgtgctagagggcttgaaggaggaagagatgactaaggaggagatcagcatcctcagcaatgcctgctctaagctgcaggaacagaagaagtcactcaccaggaagaaggaggagctggagctgctgaaggaggacatgcaggactacagcgaggacttgcaggagctcaagaaggaactttcaaagactggtgaagaaaaatacatggaaggatctaaagccagcaagagattgacaaaaagggtgcagcagataatcgggcagatcaacggcttgatctcgcagctggagatggaccagtgggccagcaagctggccccggccaagggcgtgcccatgggggagaacgtcatcagtgttgccgagctcatcaacgccatgaagcaagtcaagcacattcccaaaagcaagctcaccagcctggccgcagcactgaatgaaaataaggatggcaaggtcaacgtcgaccacctcatcaaggtgattgagctggtggacaaagaagatgttcacgtctccaccagtcaggtggccgagattgtagcaacactggaaaaagaggagaaagggtggagaaggagaaggtggagaaggaggttgcagaggtgaagagctagagccactggcgtgggcacctgtcctcctgctgcactgccaccctggtgagggctgtgagagcgatttgcggtgattcttagtggctcatctaatactttggctggaataaatcagagacttccataatcaagtaaactgtaattttcatcattccacggagcttcaatctgtctggagtcccagaatccctccacagaatcctgtctggatccacactgtggtgtggctgccacggcctcctggctccagaggcggctgggccaaggcaggaaggtgcccccctgtgtgtggcctcacgtctcagtgtctgactgtgctgccctgtgcccagggaggagaatgaggaccacatggactctgcccacacggagctggctgctacgcccaccctcagaggcgtcaggagacacagcctggccccctcagggctgaagatgcctccattcacctgtggaccttgctttctagatttcagcatcaatagacctgtcttcctgcatgcttttagttggatctgggtcactgtggagacagaggtatctgccatctctgtggcctctggagagtgacgtctccctgctggcagggccggttctcacctgcagttttccttgtgtatcggagctctttcttaactttctattttcccccaattctttaagcagtcgattggcacagagttttcccacgctggtcggcctgccccaagagccatctctgacccaagccacgcaactctgacgtagccctagccatgggactcccttgggtggtgcttgggctgcgcgccacgggggctgcagtggatttactgtgtcagggatgagcctggctcgggttggtggggctctgaagcacatttggggttctttgtagcttctaatgtgaggtttgagtccagtgcacccacagcagcatacccttctcaccccttgtggtgttgcaggctcaggcccctggggtcctttaacaagcaggctggtcaccgaggcacgaagacgaggcacagggcatcccctggggcttcaagggcaacacccgcagtgcttagggtttaccctgtgccctctgggtggggtggcctccctgcactcggcagcatggtcgggctggcgagggcgtgggcaggcagtgtcctgtggccacctccaccctcctgcccagccggctgtgtcacactcatatttttaaggtcaggttggttcctggtaaaaatgtccctccgggggcctccaagcataggatttggaagacataggaatggcacaggcagccaggaaagcagctgcgctcagacgatgccttctccattacttgaagcttctttttgttcagccattaaagaaacttgacaaaataggaacaggagatatttctcaattgtaaacctttgtgcagggacagttggcttccaaagcctttcagatttcaattatttgagaaagaagtttgttttagatccttaatatttatgaattctcaaaaaaaatcaatgtatagacattttatagctttaaccctgcaagtgtttcaagctgtgtttcttaattagtatactaactgccctggggcatgtaggtaagtgtaaatgatgtggtttgagccaagttttcatctgtaatcccactgcttgaggtggccaaggccggaggataagccaagcccaggagttggagaccaggctggacgatggagcgagaccatgttactttctttttcttttttctgagatggagtcttgctctgttgcccaggctggagtgccgtggcatgatctcggctcactgcaacctccacctcctgggttcaaatgattctcctgccccacagacaaacgccactatgcctggctaatttttgtacttttagtagagatggggtttcattatgttggccaggctggtctcgaattcctgacctcaagtgatctacctgccttggcctcccaaagtgccaggatgatggcgtgagccaccgaggccggccctttttacctttttttgagacggggtctcactctgtcacccagactggagtgcagtagcacagttatagctcactgcagccttgaccaccgaggctcaagtgatcctcccatctcagctagaattacaggcttgagccacagtgcctggtaattttctaattttgtagagttgggacttagctatgttgcctacactggtcttgaactcctgttctcaagcaattctccagcctcagccttagcctcccaaagtggtgggattctaggtgtgagccactgtgcctggcctttaaaattttcaatctccccaaagcctccaaaatattctttagttagttcttcagaagtagctgggctcaatccacccacgaaaacctttcggggggttctttcccttttcaagctttggctctttgcagcaggggtggggggtgatcctatcaatttgccatccagctcctgttctttccgttccaaggccttaagagcactagcagcgttttccaaaagcacagatacaaatccccttgatcttccagtaactgttttaactgtgcaatctgcaacttccctaagtcaagacacatcgtcagatctttttgcttgtaacactgtaccatcatccggcagatcttggatccctctgcgatttcctctgtattggttgtggtactcattcaggtctttgctggtggagaagttgtaggcggggggtgctggtgcacattcagggtcaggcagcagcttatgctacggagttggatttcaaatggtggtggaagagagtcattataattttacgagatcactgtggtgtgtgtggtccattgttgactgaaacaccattaccccatggggaggggctgcctgaagcctgtaagggtagctgcccgaagccctttgagggtagcactctaaggtccctgagatcccatgggcgtatctccctgaggccctggcgggaatgactgttggaacctcagtggtaagtgatgccagtgtcctctgtggaacacactgctggggtccctggtggttcccaccgcgtagctgatactcgtggcccctgcttttcttctttgtgcatagcgatctcctggcatctcaggtatgcattatctcaccggtgagctttttcttgtgggcattctcgggttttttcactttactccactgtgttgctgcagatcttcaatgggtccttgagcgttctgggctattctggcttgtgaatatctgtctgtagttgatttgtgtgtgggtagtgggagggggaaatgaaggttggtatctcctactccaccatcttggtgatgtcgctccactctttccttttttttttttccaaaataacccagcaccattgccccaactaaaaccattaagataattcctggccggacacggtggttcatgcctgtaatcccagcactttgggaggccgaggtgggtggatcactagaggtcaggagttcaggaccaggctggccagcatggtgaagcctcgtctctaccaaaaaatacaaaaattagctgggtgtggtggcacgtgcctatagtcccagctactcgggaggctgaggcataagaatcgcttgaacccagcgggtggaggttgcagtaagccaagattgcgccactgcactccagcctgggcgaaagagtgagaccctgtctctaaataaataaataaaatagagctattaagataattcctcaacaacagtaagttgccaggcattcatatttcctcctttattcttgtttcattttgttttgtttgagacggcgtctcgctctgtcgccaggctgcagtgcagtggtgcaatctcagctcactgcaacctccgcctcctgggttcaaacgattctcctgcctcagcctcccgagtagctgggactacaggtgcacgccaccacactcagctaatttttgtatttttagtagagatggggtttcaccatgttggcctagatggtctcgatatcctgacctcttcatcctcccgcttctgcctcccaaagtgctgggattacaggcgtgagccaccacgcctggccccttattcttgttttctttttcttggttgcttggtttgcatcaggactctcccagggtgtgacatgcatctccctcccgcctccaatctccccacctgtcatccctgaaacaataaacctgggtccacctctggaaggataagaacccagatctgtggccagtggctcaccggggctatggggatgtgtttgcatttgaaggtacagatagggccccgggaatgtcttggtttctgtgcctgacccaagtgtgtcgatagctcctctgatgccccctgagagtcaggggaactaagcatgcccctctctccacacatacatgccacccactcttctctccacgcagcccctctgctgcccttgattagtcacagacgccaaggtgggtgaagtagggaagagcctgactgtccacaatggcccccagtagccaggtaccaggaagaggcgtaaaagggagtcccgcctttactcctatagatggtggctcctctggttacgatttcagaattcaacatgttttacaatcaaaactagcatttgataagaaataaaaatcaataacccagccaaacacaccatccacatactcccaacgtgagagcaggaagaatcttgtgccttaactcccttcctgccatcagctccctccctccctccctccctcctccgtctctagcccagcaatccctctactccagttttgcccagctattgggaatcttggacagcttccttaggcccctgtgcatccaggtagggttggggcagcagaaagcgaagacccactcaagacagaccttgtcagtgcgtgcttgactcctggtcttttctgatgctttgtttgactcaacatacctcctccaacaacctgatttgcattgataagtgtcactgtgttttcctttgacacgactccgttgcagtttgccgagcccttgatggtaccaggctctgggcacgtagcacccacatcctcactggaaacccagagagctaaagctcctcatccagggccacacaacaagcagggctggagcctggacaccaagccaagcccctctgtttcgaattcttgctcttcaaccacagctcagtctcctcccaggaagtggtgatccccgctttgggcgggacacggttaggtgcatcagaggtcataggtcgcaggtgggatgtgaagtctgtgaagtcgcccacttcctctgggcttgtgggcaaggacagtgcagccttgggggacgggagttaggagccccagcttgtaacagtgacccgagctgtggcacaggtcccctggctccatctaatgctctgttgtcactgtcctgaaatgatcaacgatctttgaacaaggggatttgcatttccattttgtacaggggcccctcgaattctgtctcaggtcctgttaagagctctttaggagtggttatttattttttgtataagcagagtcttgctgtgttgcccaggctggtcccaaactcctggcctcaagcaatcctccagcatcagcatcccaaagcacgggaacaacaggcgcgacaccgcgcactgccctgggacagagcctttggggatgacgcccgttccttggttgttcggtggtggtggggaggatggctcctgaggggcagctgccgaacagtcctgtgcttgccattctaggcgtctgagctgattctggatgcagtggcagcagccccagcactccccgaggaaagtgagtggctggagactacccagctccagcagagtctgcacaccagggcggaggccgaagcgccccgcgcccctggcttgctgggtgagtctggctcctgtgtggattaagggttggaaatggagtttgggacttcaacccaaagccacagactttgttaatgggttgagttgggtgcttcggtggtgaactccacacttcccccagaaagcatgcacacctcctgtgaggactgagatctggggcccctagaaccaccatgtacatcgttcaccctacgagaagggcctcagcctccgcacctgaacggcagccaaggcagacagtctgagagtgttggagcacggggttacccagagggccagccaggtaggaacaagggccagtgctgtgggatctgctcccaaaacatgtgcctttttttttttttttcgagacagagtcttgctctgttgcccaggctggagtgcagtggtgtgatcttggctcattgcaacctccgcctcctgggttcaagcgattctcctgcctcaccctcctgagtagctgggattacaggcgcacaccaccacgcccagctaatttttgtattttagtagagacggggtttcaccatgttggtcaggctggtgtctaactcctcacctcatgatccaccttcctcggcctcccaaagtgctgggattacaggcatgagccactgcaccggccacatgtgcccttgtatcttaaaggacagaacggaggacacaggggccgtattgagcagaggaagggcctggacttggctcagtcactggggtcctccgtgcccctggggagcacagggagatgccaaggccatccactcactacaggtgacccatctccctcgccctccacagggtcccgggcccgcttgcctctgaagccgagtatctgggacgagcctgaggaccttctcgcagggccctcctcagacctgcgggcagaagggactgtgatctcgagccccaagggtccaagtgctcagagaatcagtccccgaaggagaaacaggaacactgaccagagcggccgccaccagccatccctcaagcacaccaaaggtggtacccaagaggctgttgcaggcatctcggtagtgccgcgtgggccccgaggtgggcggcccttccagtgtgccgactgtgggatggtcttcacctgggtcacccacttcatcgagcaccagaagacccatcgcgaggaagggccctttccgtgccccgagtgtggcaaggtcttcctgcacaactccgtcctcactgagcatggcaagatccacctgctggagccaccgaggaagaaagccccccggagcaagggcccccgggagtccgtcccacccagggatggagcccagggcccagtggcccctcgcagccccaaaagacccttccagtgtagcgtctgcgggaaggccttcccctggatggtccacctcattgaccaccagaagctccacacggcccacggccacatgtgaatggccagcctcgggcctcggccacccggccctgagtccctggggggagctgatgggccccagaagatgggggacatcccccagccccaccaacccctggccaccttgggactcctcttgaaggacacaagctgtttctcggaagaccctggacacctgctccgaagccaagcacgggatggggcttcccagggtctcagctgagaagcagcagttccacagcacagcctggtcagtcctgcgcactatagttttgcaagtggcttgaagaggagtttcattcgcgtcccatctttcagaagccttgtccaggtctccctgttagcacctgactcagcggcagcttctgccgctgggttttcatttcactgtggatatccctgaggccatgagggtgggagccggcctgggcagctccaactccagagaagggtacagctgaccccggctgccctcctgccagcttagcccccttggaacctaacagataaacagggttttgtttttttccttttttgggtaaagtacatgcaacataaaatttaccatttcagtcattaaaaatgaacagttcagtggcattaagcacattcacaacactgtgcaactaccagcactctctagctccaaagatgttttcgtcttgcccagaaagagagcccacagtcctcagcacgccttcgccattcctgcccgccctgacaaccagaatctgcttcctgtctctgaggatttcaggcgcagtctttaggcctgaccaaaactgacctgcctgtattttgtttgacttacagaaggattttttttttagatagatgccaacatttgtttaaaccataaaaatctggctttctggtctgccaggaaggatcagatggtctccaaagagtgggcccgcctctcctgctaggctggagcagagtgtgggcaggcggtgacgtcacagcggggagccagcctcggactcggcttctcacccgtccccaactcattgttgtcggacactcgtcccctttcaagcaaaagccttaaaagtttttgcctttttctttttctcctcccgacttcacttggaaacacagtgttgggctgactgtgaatccgcacaggcagagacatttttccaagtcgccttctaaatcaaaagcctttggacttacccacgtcacatccgcctgctgctgcttctcaaccaagctgcccccactctcggcctctgtccccgatggccctctcgggctgtgcaggtcccacggacccaccgctgccttcacttcatcctcgctgccgcgcttgccttctcacgcttgccttctcggagcgccccctaaccgcgcctccggaccttgcttcccggctccctcaggcatccccagcttttccctgcagtccccactgggggctcctggctctatcctatgccttaattgctggtgggctccagctcccctcctggcaccttctctctcatcctgcaaaggaggagcttcttctacagagctcaggatggagggtggggtcttggccccgcagtcagcccattactctcggaagcccccctgagccttctctcaggcgcagattgatcgtctcagacaacgggatgtgtagagatagctctcccgagtgcccccacttgttgggagccaggggctcattccatgctgtttccatctcggtctccacctgctggaggcacaatcacagctcagtttgttggtgccagagttgcacaagaaagtgggtgccattgaacacgaggcatcagtcaggctccagcctacctgggctggccccagagacatccatctggtgtccctcagttctccaattgagtttgtccaaataactcatcttcccttgtgcaaaaacaaaaaacaacaacaaagaaaacaacgcaaactgcctcccctctggggttcccactcccctcagagggaccaccaccttccaaggccccacaaggatttttgattgccctgggaacccagctcccaatccctctcagttctcttttctcctctgcaccatcagccccaggctctctccccatttcttgaatgcctgcagctgcctctaagcaaactctgcctccagcccgttccctctgccccatccccatcctgcagccaacagggtccctctaaaatgcagacactgaaaagacaaagcccagcagggtagctctatagtgtcctttgtggccctgctgcctccacagcccccagcactgggatggtggaggctggtgtccttaactcactgtgtctccacctgactccacactgcctctcaccctggcctcctcctgtgcctagaacagtctccactgccatacttgaccacacccagcatacaacaggtcctacagagtgaagggatgagtgactcaatgagtgaggggaagtccctgtggagacaccgggacaccattgtgggctgcagtttccagccggggaagcctccctcgacctctgaggggaggtgggccaccccttgagggccactctcaatgcgctccaccttggctgacggaagcaaggacgtggcccaggatcctggagggccactcctgtgtgcgccaccttggctgacagaagcaaggacgtggcccagggtcctggagggccactcttgtgtgctccaccttggctgacggaagcaaggacgtggcccaggatcctggagggccactcttgtgtgctccaccttggctgacagaagcaaggacgtggcccagggtcctggagggccactctcacgtgctacaccttggctgacagaagcaaggacttggcccagggtgctggaccagttgtggcagctgctgcaactcacgaaagccaccacgtggtgttcttcacctaacttgcccagtcccaagcccctgcccgagctgcagtgagacagagcactagcccctctcttctctttgggttcaccccagctgtggaagccccagcacctcagcacgcctcccttgccctgtgccttcctctgccagcaccccccaaagactccaacacccccatcacgatgtgccccagtctcctgtcctccagcccttgtcacaggagctgtgagcccagccctgggcacttcacgctctggaagaccggagtctcagacgccacctttctccctggcagccagggtctcttgggtcagaggaggcctggacactgccaggttttgaagctgtcaaaaagattttttttttaaagggagaaatatgtccagggagctgtaactgttacagtatattttaaatgtatgtgttgaacagattaactttttgaacattaacatacagcatgacacagttctgctatccatgctgtgattgcaggattgcttggaagctgtactgatgtgcagcccacctgctcatggtggggggtcctgttccaggccacagagaggcaaccagcaatgctctgcttggagattcgtacaggaagccaagaaggagctgagaggggcccagccagtggttacaagagacagcaggaggttcagaccacagcaagggtggcactggagtagcctccagctcatcttatttgactggtagagtgttattaaagcctttgaaatccctaccagcttttaaaaatcaagagatttcacatagaaatcctgatctctgggttctttagagaaatccagacctgggacgctgggcttgccagtccgcacgaccccacttggctggagccaagcagcacttgcccctgtagaaagagcccgcccctgcaaaagcatgtacggtttagaaacctggctgagaaaaacagaggatcagaaggtctgagggaggaaacagaggggcaagtttgagggagctgggcagggccgcctggccaccatcagggctgagcaggctcagtgtggcaccactgacagcttctcaccaggactatcagaccgcttgggaaaaagacttcaccatgagttgtgtgttcataccttttgatccagtaaaaggaaacggttgggggtgggggtggggggcaagagtatacattttgtgaaagaaaaaatacacaaaaagatgttttgtggcatttgggtttgtgagttcgagaactgaaaaacggcattttatgtataatggaaagcctctttactgctgtagagtgaaaagcaggctggctttcagtgcgacggtcacaaatgtggggctttacagtacttggaatgtacaggacgcccttaaaagccaagaagcttgcctttgctttgtttacatcagtgcattatgattttgagccattatatctcttcataattgccactgttttagggcttatgaaatttaaagtcttaacttgtgtgttaaccagccaaatctttgcaagtgtctgtgtgtggtacgagaattcgtattgtgttctctgctgttttcagagttgtttcagtcaaagaaaaaaaaatgcccgtcttaaaacttttcctctgcttcaaatacagctcccaagcccaggctgattggaattaatctgtcctcccttaaaagggcaaaagcacaaggctcagccctggctttcccagctcctctggtctcgctgctccacggacgtgtgacgtacgctggtgaaacgaagcccgcttgaatgggggcttcactattgtgtgctgctgaacctaggcctagcgcctggcaggctttggtgaatgttcagaaaatgacaattcatttcgtgtcagcgagggcacaccagctttgaatattttgctgctgttcaaatgcacaattttgacaattacctagcaatgtccaaagtcgtcataattgttagtgtcttgcacgtgatgttccttataaccatgtaataaatacagtgtgaagtctccatggctgcctcagtgtggaaaatgcaaagactcccgtgtgtgcgatcttggtgaatgttttggttgaaagtatgtgttttgaaaaaatcattgctttgtttgcagcagtaaaactgacggtagagtttccaacacgaaagcccgtgtggtcgcgccgggagctcacggcgttccaagcggcacttatcccgcgttgatgcccaggcaccccgcgcgccctgtttcaccaggcccagtcactccagctccagcagcactgagagctcacgaacgccaagggcgagagcgaggtgggggagggcggccggaaatgcgcgcgcggctctctgggaaatggagttaggctcgcgccggcgcagtgtcggctgccggtgccgcggcctttgtctcgcagtcaggagggtgagctaggccggcgaggagggggaggggaggccaggccgggccgggccgggccgggtgcggggggtccggggatcttcctgaggccctggcggggcgagtttccagcagcgcgcgtctgtgtggagtccgttttgctgcccggggcctggggaaggccgtttcggggctggcgggggcaggctttgcggggcatccctagtctgagaggagggcggggcccaacgcccagctggacaggagctgctccgacggcccctgagggaacgcgcgccccgcccctggccccacctctgccccacaccgggcactgggccgccacctttgttgatggaagagagaaactgaggcatagtgcccagggccaggggaccgcaaccacccggcccttgtcactgtagcgttaaggctcagagtctgcgcagcagatatgtgtccgcacccgccaggccttcagcttccctcagacaggcgggaaaaccctaggctgcccttctccgagcggagggccgccccacacacagcaggcgcttaaacgggtacgcggggccctggacggctctccgcggagctccccaggctctggcgcagttccccggcttggggacctgagcaccgcctctgcctgccccagctgctcacctcccctttcccacagagcagggccagccgttcctgccagaagccagggcatgacccctggggtgcgcgtctccacagacccggtgagaatctcggcctccttgcgcgtgtcctccacctcgtgcccggcctcctcgcgcgcggccttctcacgcccggcctcctctttgcaccccgtccctactcgcgctcagcctcctccttgtgcccggcccctacttgcgtgcccggcccctactcgtgcccggcctctactcgcacaactggcctctactcgcgcacctggcctctactggtgcccggcctctactcgtgcccggcctctatttgcacatctagcctctactcgtgtccggcctctacctgcacacccggcctcctaaagtccgcgccaagctccccaaccacagcctgcctctgaaaggaccgcccacgccgcgctggaggtcagcgggcacgggtccctgtctgagtgggctttatgtttgtgcggccgtcattgcatacctgaggctgggtgatgtcagaaaattgtaggtgccccggctctgcagtctgaagttgaaggccttagcatgctctgcgctccaagatggcgcatcgagtgccgcttcctcagacgtcatggaggccaagggggcggaactcgcctttttatgatgacattaaccccacccataagccaccagaagaaaccagcctcctgtaggaatgtcagaaaacccgtacaaggggactggtgcgatggcttgtagctgtaatcccagctatgggggaggattgcttgagcccaggagttggaggctgcagtgagccatgatgtgccactgcactccagcctgaatgacagtggaaccctgtctctaaaaaattaaaaaacaaacccagatttggccgggcgcggtggctcgcacctgtaatcccagcactttgggaggccgaggtgggcggatcacgaggtcaggagatcgagaccatcctggcgaacacggtgaaaccccgtctctactaaaaatacaaaaaaaaattagccgggggggtggcgggcgcctgtagtcccagctactcgagaggctgaggcaggagaatggcgtgaacccaggaggcggagcttgcagtgagccaagatcatgccactgcactctagcctgggcgacaaagcgagactccgtctcgggggaaaaaaaaaaccacccagattcagtctttagacttctgctactagctttataactttgtttatcccctaggctgaagtgcagtgatgcaatcatggctcactgtgcttcaaacttacgtgctcaagtgatcctcccacctcagcctgttaagcagctgggaccacgggcatgcgacaccatgctgggctggtccactcctttattgctggctccctccatttcttatttcaagagacaaattattggaaacgggcatgatgccttagattctaagatcctccacctcatcagcagggcacccatccaggccccacagaaaaacctgacccaaaaccccagaccaaagggaactccatccgacccagcctggctggcatttaccagctaccccaccagcagccagtgccagggttggcttggctgaggacactcgtgtgatgtttcaggagcaagtgacgtttgaggacgtggtagtgggcttcagccaggaggagtgggggcagctgaagcctgcccagaggaccctgtaccgtgatgtaatgctggacaccttcaggcttctggtctctgtgggtaaggccacacccatgtcctatctgttgatctgtccctgacacggattctgattctaccaggttaaatatttataggactgagctttaaaagcaaatgcctggggctgtatgtcttgggctttaagaacctgactgttttaatgtaggaaatatcaattaagaccaatattagcaagtctcagactcaacctgaaatcaacagaagcagagaaacatgaggtgagggaaacatactgggtctgaagactacagaatcccagggtagaccagggtgttctgtagagctgttaggagcccctccttcttcaacacctccctctgcacttctgtcttagtctgttagggctgctaaaataccttagactgggtaattttaaacaatagatatttgttgctcatggttctggaggctgggaagcctaagatcaaggtgtcagcaaattcagtgtttggtgagggcttgctcctcactgatggcactttcttcctgtgtcctgacatgccataagggcaagggagttatctcaagcttcttttataagggcactgatcccattcatgagtggagccctcatgaattaatcacttccccaaggccccacctcaacactatcagattaggtattacattctaacatttgaaccttatttatttatttatttatttatttgtttttaaattttttatttttgagacagagtctcgctgtgtcacccgggctggagtgcagtggtgcgatctcggctcactgcaagctctgcctcccgggttcacaccattctcctgcctcatcttcctgagtagctgggactacaggtgcccaccaccacgcctggctaatttttttttttttttgtatatttagtagagacggggtttcaccgtgttagccaggatggtctcgatctcctgacctcgtgatgcacccaccttagcctcccaaagtgctgggattacaggcgtgagccactgcgtccggcctgaaccttttttatttttaagaaacagggtcttgttctcttgcccagggtggagtgctgtggcacagtcatacttactgcacacttaacctcctggctcaagtaaaccttccatttcagtcttccaagtagctgggactacaggtgcataccaccacacctagctaatttttaaaatttttgtagagacgggtccttgctgtgttgcccaggctgccctcaagcttctaggctaaagtgatcctcccacctcagcctcccaaagtgctggaattacaggcataagccactatgcatagcctgaattttagggggacaccaacattcagaccatagcaatctctttctggcttcatttccagagaggctcctctggaggtgacaagacaactgcctggggtgcctttcctgcaaccaagaccagcagaaaagacaggatctgtgtcccagggttgtcctggtttggctgccaggtcttcttcacagtgatcattgatgccagtgggcaggggaggaaccagagttctgattgtccaggcttgggtcacatgtccaccccagaaccagtggtagggtcagggactgagagtaggggaatgagtccctgaggaacatccagggctgtgggtatgacagctgaagtcactcaggggtccccagccatctgggacctggaagaccaaaggtggaatgggctgaggctcaggaagggtcctgggatacaaatgctcactctatgggtctctccctgagcaggacattggttaccgaagccgaatgtcatctccctgctggagcaagaggcagagctgtgggcggtggagtctagacttccccaaggcgtgtacccaggtgagatgggagcccttcggggcagagagaagcctgtccatgcttgcttcctggtttctccctctgcatctgctctctaattcttcagagcaaatttactactcagtcttagtgaagatttaccaagcacccattttgctgtgagtgacgacaccacgtcctcatctccactgaatttatattcttggtgagggagtgggggaaacaaacaataaatcggtaaaataataataataaaacaagttggatgattacagattgtgatgaatgccgagaaaatgaaaatgagcaatgaggtagactaggagggggatgagtagactttagcagagagatgagggatagcctctccaaggaggtgacatgtgacttgaagcctgagccatgaggcagtctgagtgaacagtagtatttcaggcagaggaaacagcaggtgcaaaggcctgaagtcatgcatcagtcagcttttgtgtaggaaaacactctgacctcagtggcttaaaccaaataattgtttataattcatgtgtctgtgggtcagtggatccaggctgggccctacgccatgtgcctgtagggtgattggtaggtagcagaggtatcccagcccactgacaggcaatttcccattggcatcaggtgggaagagtggcctgtcaccagagtccaggagggatggccagtgtgggaaagggtcacagtagggtccctccacatcaataacagcccttacccaatatattagcttcctattgctcctcctgcaaccagttacaaatgacccgtgaataacatgggtttgaactgtgtgggtccatttatacatggattttcttctgcctgagccacccctgagacagcaagaccaacccctcctcctactcctcagcctactcactgtgaagacaatgaggatgaagatctttatggtggtccacttccatttaatgcatagtaaatatattttctcttccttatgatttttttaaatagctttttctttagcttactttaagaacacattatataatacatatacaaaatatgtgttaattaagggctgggagcagtggctcacacctataatcccagcactttgagaggctatggcaggtggtatttgaggtcgggagttcaagaccagcctggccaacatggtgaaaccccgtctctacaaaaaaaaaatacaaaaaaaaaaaattagctggccatggtggcacgctcctgtagtcccagctactcaggaggctgaggcaggagaactgcttgaactaggaggtggaggttgtgatgagccaagatcacgccactgtgctcctgcctgggtgacagagcaagaccatgtttcaaaaaaaacaaagtgttaactatttattttatcagtatggtcaacaataagctattaatagttaagtttttggggagtcaaaggctatacacagattttcgattgtactggggtcagtgcccctagccccctcattgttcaagcgtcaacaatactacacttcgtagcataaagcaaagcaaattattttaaagttcgggagatcagaaatccacaatgggtctagctggaatataataaagatgtcagcagggcatcattccttctggaggctctagggaagggaagaatctatttctttctctcctttttgtttttttaagagatggggtcttgctatcttgcctaggatggagtccagtggtatgatcatggctcacagcaaccttgaccttctgggctcaggtgatcctcctgcctcagcctcctgagtagctgagactacaggtgtgtgtcaccatgcccagctaatttttttttattttttgtagaaacaaggtctcatcattttgcccaggcatgtcttgaactcttaggctcaaggagtcctcccacctcagctgcccaaagtgttgagattacaggcatgaggccctgtgcctggctaagaatccgtttctttgcatttttcagcttctagaggcacccacattccttggctatggccttgtccatcttcacagtcagcaaggcctggtcaagtcacatcatattcactctgactctgacccttctgccttttttccccatttaaggaccctcgtgattacacaggtccacccagataatccagtgtaatttctctatcttaatgttagctgattagcaaccttaattcctccctcccatgtaattggaaacatacaggttatagggttaggatgtgggcatcttgggaagccactattctgccattcactctggcttaacttttttttttttaattgaacttttcactgaaacataacaatatggggaaggtgcccacatcacacctctaggccactgtggggtcagggtaggggcagcacacacccaggtcatggctgtgcagagagggctgggtaccagggcaaaaagagagtcctgccatgaaggaggaggagggaatgcatttgttcattcattaagcatgtatattgagctcttgctgtgggctatagatacagtggtaagcaaggtggacggaaacccctaccctcaaggggttcccagttagtgaaatggacaaaataaggcagaccaaagcactctaatatgccacgggtcatttttcttcctcttagtgatgtacattgcagctattcctgtttgtggggagcagttaggttcctttacatctagagtgaggtggcacaacagcatatgctgtcgggaagaagctgggtatcagccaactttccccatgcagcacgtttttctctgttgccacctggcattgtggaggccactgtagctggagcctgggtgccacactgctccttccaagtccagtgcctctgtgtgtctgagtgctctctcctgggcatccgctctgcatcctcctctgtgctcccctcacagactccattcatactccttgtgccaactgttttttcctccctctcctcttcctttccttattctgttctttcctcttcctttccttattccttattttcctcttccttattctgtgtttccctctcttcctttcctggtttgcaaaactatatttttaaatggtcaaagccacttgaaccttgaacgtttcaaaataattagttttatccttcctcttcccatctcaccacaaactcttttgccgtggaacagagattaagggacatttccagtttttgcttctttcagacttggaaactagacccaaagtcaaactgtcagttctaaagcaaggcatctctgaagaaatatccaacagtgtcatcttggtagaaagattcctgtgggatggtctgtggtactgcaggggtgaggacactgagggccactgggaatggagttgtgagagtctagagagcctggcagtgccggtggccttcacgcctgtgaagacgcctgttctggagcagtggcagaggaatgggtttggggaaaacataagtctgaaccctgatctcccacatcaaccaatgactcctgaaagacaaagcccccacacatggggaacacgtggaaaaagggagaagccagacctaaatgttttacagaaaacctgtgtaaaagagaaaccctacaaatgtcaggaatgcggaaaggcctttagtcacagctcagcacttatcgaacaccaccggacgcacacaggagagagaccttacgaatgtcacgaatgcttaaaaggcttccggaacagctcggcacttaccaaacaccagagaatccatactggggagaaaccctataaatgcactcagtgtgggaggaccttcaaccaaattgccccactgatccagcaccagagaactcacacaggtgagaagccctatgaatgcagcgaatgtgggaaatccttcagttttaggtcctccttcagccagcacgagcgaactcacacaggcgagaagccctacgagtgcagtgagtgtgggaaagccttccggcaaagcatccacctcacccagcatctgcgaatccacactggggagaaaccctatcagtgtggtgagtgtggcaaggccttcagccacagctcatccttgaccaaacaccagcgaatccacacaggggagaagccctacgagtgccatgagtgtggaaaagccttcacccagatcacaccactgattcagcaccagaggacccacacaggagaaaagccctatgagtgtggtgagtgtgggaaagccttcagtcagagcacactcctgaccgagcatcggaggattcacacaggagagaagccctatggatgcaacgagtgtgggaaaaccttcagccacagctcctcactcagccagcatgagcggacacacacaggagagaagccctatgagtgcagtcagtgtgggaaggccttccggcagagcacacacctcacccaacaccagcgaatccacacaggggagaagccctatgaatgcaatgactgcggcaaggcattcagtcacagctcgtccctcaccaaacatcagcgaatccacactggggagaagccctacgaatgcaaccagtgtggcagagccttcagccagcttgctcccctcattcagcatcagaggatccacacaggagagaaaccctatgaatgtaaccagtgtggcagagccttcagccagagctcccttctcatcgaacaccagaggattcacaccaaggaaaagccgtatgggtgcaatgagtgtgggaaatccttcagccacagctcctcgctcagccagcacgaaaggacgcacactggggaaaagccctatgagtgtcacgattgcggaaagtcctttaggcagagcacccacctcactcagcaccggaggatccacacaggagagaagccatatgcatgcagggactgtggaaaggcctttacccacagctcctcccttaccaagcaccagagaactcacactggataaacccactccacatgtgctggggacataggaagaccttaagccatagctcatccctttctagatttgacccaatcatacacatgagaaacgtacattcatacacaagccttttcacacagcactcccctcagacaccctcagagagttcacactgatgggaaatgaccatgggaccaccaagctctaggtcatccatctctgcatccaaatagtagggaaacgtggagataatcaacactcaggaccttcagccttgaacgcccattagtgctatgttatagaacctacaaaaaagaaatggaacaaatgtagtggatccagggaacgcttttgtccaaggattcaccgtattccaaaccagagatgttcaaattggtgagaaacccaacaaatgcctttcatatatacgagaaccaaatgaagtcagaatttgccattattgcacatcacatttttgggggggaaagtgcttatgaatggtgcaggttgactctgatattcattcccaaatgacagtatggcagagtgttccagaaatgagagtggcatctttatggaatcactgtggatactgactgtctcagtaaacagctgtcttgtctgtgtgtatattgtttgatcagggtacatggcagccagtcacagattggaattacatatgacaaagtatcagtgtactataaacaggtttttagttatccctgcattatttttgcaattaatctttatatgcaatgagattgaaaagctttgtatgggaagactcaaaatgtaaagctgcttccgtagagtctcactgattctgagatggcttttgctgctctgttctccctctacatttctctgcagaactcgcgttagaaacacagatatttgttttacaaaaagggagatttttcctttgttaaaccatcgtcttataagcaatagcaaattcatgttagaaacttctgttttgcaagattcatcttttttgggatatgttcaagttaatcctctcaaactgctttttcattgttttcatacaatttaacattttgttaaaccctaagtccacaaatagcagtctttctgacaactataacctttaaatggtgacttgctgccctcattagaaattgcattggctggccaggcgcggtgacttatgcctgtaatcccagcactttgggaggccaaggtgggaggatcacctgaggtcgggagatggaggttgcagtgagctgagatcgtaccattgcactccagcctgggcaacaagagtgaaactctgtctcagaaaaaaaaaaaaaaattgcattggctgtttttggttattagctgttagttgtggttacatccatcaatttgatttttctaatcccaatgctgggatataaatttccagttacttgaaatttctctcttggggagaccatgttgcagatagtcttccaatattgcttctcattatgattgtggagtgcctcttgggataaatgcctttgtcatttacaagccaccggagagccaggcatggctgcacctgcctctagtcccagctgcttgggaggttgaggcaggaggatcacttgaacccaggagttctgggctgtagtgtgctctactgattgggtgtccacactaagtttggcatcaatatgatgacctcctgggagcagatgaccaccagcttgcctatgtaggggtgaaccagagcaggtcaaaactcccatgctggtagggctcacatctgtaatcccggcactttgggaggccaaggtgggcagatcacctgaggtcaggagttcaggaccagcctggccaacatggtgacaccccgtctctactgaaattacaaaattagctgggcacggtggtgcatgcttgtaatctcagcaattttggaggctgaggcagtagaatcacttgagcctgggaggcggaggttacagtgagcctagattgtgccaatgtactccagcctatgtgacaagagtaaaactcaacctcaaaaaaaaaaaaaaaactcccatgctgatcattagtgggatcgtgcctatgaatagccactgtgctccagcctgggcaacacagcgagacaccatctctaaaaaataaaagccactggagaaagccagggtacacagtgcatagcagcactgtctcattgaaacaatgcaagtcatataaataactttaaatattctggtagccccatttaaaaaacaagaagaggcccaggcacagtggctcatgcctgtaatcccagcactttgggaggctgaggtgggcagatcagttgaggccagcctgcccaacatggcgaaaccatgtctctgctaaaaatacaaaaattagctgggtgcagtggcatgcacctgtaatcccagctactcgggaggctgaggcacgagaattgcttgagcctgggaggcgtcagtgagccaagattgcaccactgcactctagcctgggtgacagagcaagactgtctcaaaaagaaagaaaacgcaagaagaaacaggtgaaactaaaatttacccctatatatctcaaatgttagcagtttaacataccaatatgaaaaattattgagatatttgcattctttctgttacgtgacatcttcagaatctagtgtgcatctttttttttttttttttttttgagacggagcctccctctgtcacccaggctggagtgcaatggcacaatcttggctcactgcaacctccgcctcccgggttcaagtgattctcctacctcagcctcccgagtacctgggactacaggcatgtgccaccacgcctggctaattttgtagttttagtagagatggggtttctccatgttggtcaggctggtctcgaactcctgacctcatgtgatccgcccgcctcggcctcccagagtgctgggattacaggcgtgagccaccactcccagcctagtgtgcatcttatacttgcatcacatctcagagttgaccatagcgacatttcaagtgcccatttgacacgtgcagctcaacagtttggtctttggtcagctgttttgtcctccttccctttactacctgtgtcctcctgcctttccctgtgttcctatccttgtgtagcatcttgtgctcaaggaaaccaaatgtgctaggaagatctgctgctttaggtaattggaatgacaggtgcctactcatttcaggctccctaggatattattcttatcacagaacattacattcaggaaagagattatggccagtctattccagttcagttcagtaaaaatggaatctggcacatgcacttttgcagtcctttgaaagtgctagattggcataatcaccaagaaacggtaatgtgagttctttcctctccactcagcccctcttcatcagacctccttcagcgacacaggggaaatacagcaaggattgggtactacagagaggtgcccacagtatcacttctctcctaagccagggaaagagatgagattcctctccctgatggtgccaagccagtggaagggcactgtgggggttacaccctcctgagtctagaggaccttgcttactacgcctcagttattggcacacaagtagaagatcaagtgggaaaacaggtgaatgcaggtgaaataagaatgagggagagttctgaggctagttcagaaaaggccatacagcgtctgtctttttttgctggaacacttgtgcttggagccctgagacaccacttgagaaacccactggcccaaggccaccatgctgtgaggatgaagccacacaggctctgctcagggtgtcagttcactcctagtctgaatctccccagcctcatcaggcctgtgacagaacagtcttcagatgattccagcctcccagctttcaaggtacctcagccttcaagttcccagctgaggccccacacatggtggagccgaccaaagtcataaagtcatccttgaatgtgccttttttttttttttgagacagagtctagctctgttgcccaggccggagtgcaatggcatgatcaaggctcactgcagcctccacctcctgggctcaagtaattctcctgcctcagcctcccaagtagctgtgattacaggtgtgtgccaccgtgcctggctaatttttgtatttttagtagagacaaggtttcaccatgttggccaggctggtctcaaactcctgacctcaggtgatccacccgccttggtctcccaaagtgctgggattacaggagcaagtcactgcacccagcctgaggtctgtttttttaactgtgcaggcagccgctccactccacactgcctcttgctcctcctctggccatgtgatatgtctgctcctacttccccttccaccatgagtaaaagcttcctgaggcctccccagaagctgagcagatgccagtgccctgcttcctgtacagcctgcagaactatgagcctgttaaacctctcttttttataaattactcaatctcaggcatttcttgatagtaacacaagaacggcctaacacagtgagcacagtttctgggtgtgcagccatgagactgagaggaaggtctggttctttagcaaggaaaggttctgtctctttctggatgcaaagggagaagtatgctgcctaccacctgcaagcacagagaggaccatcctgtacagagtcaactcagagaagacagcaaagcccaaactcatctacaattcaagcaggggccccaccctggaccttgcatcctggtctttcacagcaaataaataataacctcagctgggcgtggtggctcatgcctgtaatcccagcactttgggaggcttgctcgaacccaggagttcaagaccagcctgggcaacatagtgagaccccatctatacaacagataaaaaattagccagtcatggtagcgtgtgcctgtactcccagctacgcagtaggctaaggcaggactatcacttgaacccaggtatttgaggctgcagtgaggtatggtttcaccactgcactccagaccatgtttctaaaaaaaaaaaaagtaaataatatcctaaagtgtatacaattttgagttggatttctggtgactggcagccaaaaatgcatcttgagtggaagaatcgtagaaagtagagaattaagtatcctttggcttcccattgtgtttctgaaaaaaagtcaggaaagctggtgcgatggtttggatatttgtcccctccaaatctcatgttgaaatgtgatccccagtgttggaggtggggcctagtgtgaggtatgtgggctatggggtggatcccacatgaatggcttagtgctgtcctcatggtaatgagtgagttctccctttatgagttcacccaagagatggttatttaaaggagcctggcacttcctcccctctctcttgttttctctctcactatatgatgcaccagctcccctttgccttccgccatgattggaagcttcctgaggcctccccatagtgcagatgccagcactatgcttcctgtacagcctgcagaaccgtgagccaaataaatctcttttctttgtaaattacccatcctcaggtattcctttatagccgtgtaaacagactaacacagccagggccgttggaagttttgtggaagcactgggtaggactgacgtgtggtagtcactgtccctcctgagtctcctcttatactgtatgtgagagggagattctttcaggcagcaagtattttccaagcaccaactatagctcaggcacaattccagactctggcaactaaactgatgaaactcgtggtctcaggagcttatattttggtggggaaatggaaaatagagaaattaggatgttatgggcacattacacagtaagtgttatgtagaaacaaaatggtccaagaagggaaaccccaggctgggcgcagtggctcaagcctgtaatcccagcactttgtgaggccaaggcaggcagattgcctgaggtcgagagttcaagaccagcctggccaacatggagaaaccccgtctctactaaaaacacaaaattagccgggcatggtggcacgtgcctgtactcccagctactagggaggctgaggcaggagaatctcttgaaaccggaaggcagaggttgaagtgagccgagttcgcacaattgcactccagcctgggcaacaagagcgaaactccgcctcaaaaaaaaaaaaaaaaaagaagaagggaaaccccaagtcctctggacttttttttttttttttttttttttttttttgaggtagggttttgctttgtcacgaaggctgtagcttcaacctcctgggctcaaatgatctatctgtcccacctcagcctcctgagtaggtgggactacaggcatgtgccaccatgcctggttaacttttaaatttttttagagatgaggtcttgctatgttgcccaggctggtctcaaactcctgggcccaagcgatcctcttgtctcagcctcccaaatgctgggattacaggcatgagccactgcgcacagcctctctggacttctcagttacctgagccaattcattcctttttggtttagccccatggcaggtaacacaaattcaatccaattaaagaaacacaactagtaagctgggtgtggtggctcatgcctgtaatcccagcactttgggaagccaagatggatggatcatttgaggtcagcagtttgagaccagcctggtcaacatggtgaaatcctgtctctactaaaaatacaaaaaatatatatatatatattagccatgcgtggtggtgcgtgcctttactgccagctacttgggaggctgaggcaggagagttgcttgaacccgggaggcagaggttgcactaaaccaggattgcaccactacactgtagcctgggcaacagagaaaggctctgtctcaaaaaaaaaaaaaaaaaagagaaaacacacacacacacacacacacacacacacacacaactggtaaattacctgcccctcaaagtgcagtgatgattaaatgagctcctggaatcccaaagcgtgtggcaaagtataaagtgaatgtaaaacatccgttcatttgcgttacttgtaaaactgtcatgcccattaaatgcccaaaaaaagaggctgtttctgaagacagtctctttgttatagtacacacatactttatatagcagcacacagatgtatatatttagataccgtatacattcttatagagaggaggaggtttaagctttagctgtccttaggagaagccaagagtgacaccatgaaaccacacatcgctggctcacatctgaactcagtgatttagatttctgctgggaggcttttctgccttcaaaggccgctccatgccatttctttttctttctttctttttttttttttttaaatccttagggtcttactctgtcacccaggctggagggcagtggtgtgatcatagttctctgtagcctggaactcctgggcttaaacaatcctgccttagcctccttagtagctgagactacaggcatgcaccaccatgcccagctaattttttattttttattaagacaggggcccactatgttgtccaggctggtctcgaactcccagactcaagcaatcctcccaccttggcctcccaaagcacttggattatagtcatgagccaccactccaccatggtccacgcatttctgtcacacactcacccccaagttctgtttattttaggagagtgagggctttaaaggaaggtctcagggtttactgtcaaaggaattgattcgtttattcttctctttgagcccagagtaaacaagtataaaccacacagaaaatgcccctggccctatgtgggttgcaagttagtgggcaagataggcaaagcaagtcatcagaagaaaagcaaggtgagtcatagcggagaaaacacagtaagacgggccagacgcagtggttcacacctgtaatttcaacactttgtgaggctgaggcgggtggatcacctgaggtcaggagttcgagaccagcctggagaacatggtgaaaccctgtctttactaaaaaatacaaaaattacccaggcatggtggcagaagcctgtaatcccagctactcgggaggctgaggcagaagaattgcttgcagtgagccgagattgtgccactgcactccagcctgggcgacaagagcaagactttgtctcaaaaaaaaaaaaaaaaaaaaaagtgataagatgaataccagcccagagatgataacaacttggggattattgtgtttggtgaatggggtgagggacgtcacattaaaaccatggcatcagggcaaacctccgtgaaaagacaggcagagccacagctggagagacctccccagtactggggccttggtgaggagctggggagcttagatttaccatgtcccagaagccaccctctcactgagcagatttccctggcagttgcccccatcgcatgtggctggtccctcaggagcctgtgtctcaagagctacctggtcagccagaggctggactttggaaagctgttcatttcattgagacatctgggaacctttctacaaattcatgttctctcgagttgagggaaggctgggctgcactatgttttgaggctctggcttcatggatttgccatgaaagtaagctgaaactctaggtccctcactttcagggatcccttcaagaccaagcgcctaattttatctttgtaattttgaattattcttctgaagagggacccctcagttgtgtgagccttaggcccaacaaatctggatcgacccctggttccagcaaccctcgtcttagagacttctgcatggacactgggaagacagaacccagcactgccaagggtaatggatctcccattttgatgtgagtgaaaaccacctgaaggtggagggtgttaaacctgggaccttgctttggttggtccgagggggtttggtaatctgcacaccaaggcactgggtgattctgaaacagacccggaagcctcaagtgagaactgtgcccaaacttcctgaagcagtttgtctgcgaagcccatagttcccaagtgtggccccatcccaggagcctctcaggttgaaggaacagctactaataaatcactgacttcactggactcagggtaggcagaatggagtatctgcctttctttgcatcaaaagcacatcaccctatcctgttctgtatctgcctgaaggaagtccacagggtattcccgagacccatcagacacctcactcattttttcatgatacccaagagacacacttagaatgtacgcagactacacatataccaaacacattatactcacatctcataccctgaaaaatgactgggagacataaatacactgagatgtcaaaaggagtagtctgttgcccaggctggagtgcagtggcacgatctcggctcactgcaacctctgcctctgggttcaaatgattcttgtgcctcagcctcttgaagtagctgggactacaggcacgcaccaccatgcctaggtaatttttttgtatttgtactagagtcaaggtttcaccatgttggccaagctggtcttgaactcctgacttcaggtgatcctcccacctgggcctgtcaaagtgctgggattacaggcatgagccacagtgcccggccgaatctgtgtttttaacttttacataattgggagaattctttttaaaatggtgaaaaatgaactttattataaaagcccatggctgggcgcggtggctcacacctagcactttgggaggttgaggtgggcagatcacttgaggccaggggttcgagaccagtctggccaacatggtgaaaccccatctctactaaaaatacaaaagttagccgggcatggtggcaggggcctgtaatcccagctattcagtacaccacggcgagagaatcgcttgaacctgggaggcagagcttccagtgagctgaaattgtgccactgcactccagcctgggtgacagaacgaggctctgtctcaaaaaaaaaacaaaaaaaactttcaaaggaatttaaaaaactgaaataaatgtcctcataatttcatgaccctaacacaactactctttgcatttctatactttgtctgctaggatttgacaactaatgcccactgtttacacagttgcaacagaatcaacagttacattctacttgaactacacttacaaattactcttccagcgccgggcgcggtggctaacgcttgtaatccccagcactttgggaggctgaggcgggtggatcatgaggacgtgagtttgagaccagcctgaccaatatgatgaaaccccgtctctactaaaaatacaaaaattagccaggtgtggtggtgcgcacctgtaatccagctactccggaggctgaggcaggagaattgcttggagctgggagacggaggttgcagtgagctgagatcacgccattgtactccagcctgggcaacagagcgagagcgagactctgtctaaaaaaaaaaaattcttcgattttgctagtcttaattatcatttatgcctttttactattgctttgaatggctctaccattcatatttaagtcatagtatttaacttcatgcaaaccagcatccttgtgtatatatatatttttggtccttttttttcctttttgtggaggaaaaagtggggtctcactatgttgcccagggaggtcttgaactcctgggctcaagggatcctcccaccttggcctcccaaagtgttgggattataggtgtgaaccactgtgcctggccccgtattgttactgaatacagttggactgttagctttccaaaatgattgcactagttgacactgattcataaaactctcctcaactcaaatagtgatggcagacatgtatttgtctgcttgggttgtgatcacaaaataccacaggctgggaagctgaatcaacaggaatttattaatattttctccctgttctggaggctggaagtcagagtgggttccacgtgaagcctctcttccaagcttgtagatggttgccatcctgctgtgtctgcacctgcctatggcctttcctctgtgtgtgcatggagagggagcaatctctggcgtctcttgctatctcttttttttttttttttttgagatggagtctcgctctgtcgcccaggctggagtgcggtggtgtgatctcagttcactgcaaccttcacctcccaggttcaagttattctcttgcctcagcctcccaagtagctgggattacagatgcctgccaccacacctggctaatttttcgtagagatagggttttaccatattggccagactggtctcgaactcctgacctcaggtaatccacctgcctcagcctcccgaagtgctggtacaggcgtgagccactgtgcgtggtcctccctctctttttttgagacagcgtcttgctctgtcacccaggttggagtgcgtggtgtatcacagctcactgcagctttgacctccagggctcatgtcatcctcccacctcggccccccacgcagctgggactacaggtacatgccaccacacccagctaatttttaagttttttgtagagacgaggtctagctgtgttgcccaggctggctcctgggctcaagggatccctctgcctcagcctcctaaagtgctggggttacaagtgtgagtcacctcgcccagcctcttgcttttcttataaggacactagtcctattggatgcaggcgccactccaacgacctcatttagcctatttacctccccaaaggccttgtctccacatatcatcagattgtgggttaaggcttcaacatatgacatttaattcagctcgtaccagagggtgtttaagcattttcccattgaaatgtattcccatctttccaggtgtccatctctcatttgcttttcctacttacttagaacacagctaccttccgacaccctgtataaacccaccctgaactctacccctcttcactgccaacctgcctggggttttcccttgccccctagagagctctgtgtcctttcgcacacatcccatccctgccaactccactggacagacctgagccaccctctcctgcctcaccccacccatctttcttgctggtccacgttgccacactgttgtatgggagctgagacccactgcctcaaatgcctgaaccagcccagctgcccctgaggttaacaagtgggaatgtctagcttaataaaacatccatttgtgctccttacatcctgggcagggtggtagtggtaggagaacagcaaacaaatcctgaaatctcaatcagttcacttttggtagtggtttgggaaaggaaattctgaaactatattagagttattttaagattcatcaaattagtaaaatgctgaattttggggtgtcagggttctcagtgttaaagaagacacataaaaatatgggctggaggaagtcatgaattgagttggaggtcttactggatatgtacgtgtatgtgcacagacacacctttgtgtgtgacctgtgtgcaatcatatgcacatatatttcatagctcagcagaagacacctcaactggcaccctatcttggtctctaatgccattacccactaaaaggaaccagttcttcaaagacatggccaatttcagggctgaggaagggtagaaaggagatgggcttggaacatcctactacaccaaaaagcaaataagtgctaaaaaaaaaaaatggaggcatgtcacaaggatgcaggagtcaactgaagggagtctcactggcctcatctaggacaacttgagcaccaaaataagatcagcagcgagttataaaccactgaataaacagaaatcctgagtccattccaacaataaagacaaattcttggggagaaggaagagtgctggctggcagtaggatgctgagggcctgctggtcagcatggagggagggctggtgttggaaaatcaccaccctggtaatgatggattcaggcaagaatcataaatgaaagccaaatttagggggaagttttgatgaggagcaggatatttgcattatctttaatctttttgtgacaactgaagatcattgatacttgcatgatcttaaagtatcttcccaccgattcttattcgttaaaaggagaaaaagttaactatattctttttttgagacagggtcttgctctgtcacccaggctggagtgcagtggctcaatctcagctcactgcaaccttgacctcccagtttcaagccatcctcccacctcagcctcccaagtagctgggactacgggtgtgcaccaccgtgcccagcttcagcctcacaagtgctgagattacaggtgtaagcctctgcatctggcccagttagccatacagtggaaaaactgcactctaaccaggtgagcaaagagaacatcactgacaggaggaatgtggacaccgtgcaccctggatgggatgggggaaggcgcacacatgcaggccacaggtaagcagggtcgaatgttaataggtgggtctggatgagggtttgtggatgatctgtgcactattgtattttatttattgattttttttttgacacagagtctcgctctgtcacccaggctggagtgcagtggcgcgatctcagctcactgcaagctccgcctcccaggttcacgccattctcctccctcagcctcccgagtacctgggactataggtgcccaccaccacgcccggctagttttttttgtatttttttagtagagacggggtttcaccatgttagccaggatggtctcgatctcctgacctcatgatacgcccgcctcggcctcccaaagtgctgggattacaggcgtgagccaccgcgcccggccaatctgtgcactattttaattcttgtgcctttttaaaatataagtttgtaattatttccaaatagaaaactttaaaaaaaaaaggcatagacatctggctgtgcactaaatgagacaggagatgggaaactgaaggtggtgaagccctataacaaatgacgatcacccacagcctgagagctgagtgggacacatcacaggggatgctccctgtggcagtgcaagaaggtgagctcacaggttcggctgagaaatgggagggtacattttagcctttttcttttctttttttttttttaatgagatggagtctcgctctgtcccccaggcaggagtgcagtggtgtgatcttggctcactgcaacttccgcctccccggttcaagcgattcccctgcctcagcctcctgagtagctgaaatcacaggtgcctgccaccacgcctggctcattttttgtatttttagtagagatggagtttccccatgttggccaggctgcttttgaactcctgacctcaggtgatccacctgcctctgcctctcaaagtgctgggattacaggcgtgagccaccgtgcccagaccattttagcctttttcttaccagaaccacactcagcttggggcttaagatggataggctaagaggggaactaagcttgtaactgttgcggagacaggcactccaggtgacagttcacaggccctttcaagtgactggagccatgggatcatttctctccaaggatttgtgagtagaagtgatgtgtgtcatctcccaggtgaacaggttcggccttccctacatgctccaagggtacagtgaagagcagagctacaacagagatggggcctggatccctgaatcactgtatggagcagagtgcaaaccaatatataagcaacagcaacaccaacacaggacaatcgactgttagtaaataatttttttttctttttttcttttttttctgagatggagtcttgcactgtcacctaggctagggtgcagtggcacaatcttggcttactgcaacctccgcctcccaggttcaagcaattctcctgcctcagcctcctgagtagctgggattacaggcacgcatcaccacagctggctaattttttgtatttttagtagagacagggtttcaccatgttggccaggctggtctcaaactccatgatctgcctgcctcagcctcacaaagtgttgggattacaggtgtgagccaccacgcccggcccatgaataagtacttactaagtctctgtgatttgggggtcattacaacagactgcctgctcaaacacagtgacagaaaaagaggcaccagtttctgtatctacagggagcagttaagtttatgcgcagggagcagttaagtttatgcgcaggcaatgggaatgatactgtaatcttgagaataaatgcaatcaatgaaaagatcaccttatgtagcccaaggagtttagtctcctttgctcagacagacagatctttattagtgttttcaacttattttgctcacaacttcccagcaagaaatgtcttacattgcaaccagttctcacatttagatgtatgggtgaaaagtttcacaaaacagtatttgcctttactacatgatgcattctggcctactttattctgcttcattgctgtgtaatgctggtgaccacttgctaattgatttcccattttactaaatgggctgggacccacggtctgaaaaccctgccttaggctgcaagcatttctgtgatctctgcgagctactccatataggtaaacacacgcgaggtaaactaggaaacagcttctgcttttgcagattagaagtgaagttgacatcacgccaagtacgaaaaggctaaacagctgacaaaatttccacttgagcaaccctggggagcgcaaacaggaggaatcggggcaagggtgacttgaagaaagcactggcagatcacgcactttaaggcaactctacactgcacaatgtcaaataacctagcatggggcggcactaaatggctgcaggaaagccgagtcttcttccacatccggcggctcccctcggatgcgagcgctggcccagggtgtgtttacagaggtgagggcttcccgtggacccttctcgttgggagcgcttagcctcaggagcggattcagggcacaggcagaggacgtccacaaacaccacaggaagccgccacccaggggcgtggaaaggcccaatgcctcgtctgggattcacggccggcaaagcggcccctccggaacgggacagcacagcggctcacctctgcgcctctgggggtgcggggggagcctcgccctccacgctctctgggggaccgcccgccctagcccccgcctgggcttcgcgggtggacggttgggggccccgggcgccccccagcgcgtagcttttctccttctcgtgggtcttctggtgctcggctagggccaggctgaagtggaaggtcttccagcagccctgacaggcgtagcgcttccggccgccatggctgctgtggtgctccatcaggtgcgagagccacgcgaaggcctccccgcactcgccgcaggcatagggcttcccgcgggacaagcccggctcgtcagccccagggccctgcccggcctccagccctgcgctgtcgccggagctagagacgccctcgaggctctgcccgtccccatcctcggggtgcggcctcttggttcccagtttcgccgtgcccctgtccggggcaggctgctggatgacggactgcctctgcgatccggtggcagagtcggactccgcgtcctgggggtcctgcgggtccggggccttcccaggctgctcttcctcctcctcagtggtgcccgacgggggatcggcaagggcgtccccagggggcgcctccgtaggcagctcaggcagcacccccgcgggggcggcctcctcgcaggcgcacccagcgctctcctgccgcctcccgccttctggaacaaggtcagagccctagcgtgagcgccccgcccagggccagggagaggaggacccagccgagcctcagctgccggaacagcgcacagggctccgggctctggatccccgcggggctcacggctgtttggaagcagcgctgtccctcccaggcagccctgcagcgcatgccccgcgcctgctgctgcagatgtgggacctggaggcctccaacaacggaggccaccgacaggacaggaaggacagccccactgagcccgggttctggaaaccgcgcctttggaggtctccacctggccactagcttggccacaagatgcacgatgcaaggagagcctgctcagagcgcaccctcctggagggaggggcccggctgccagcgaagagagtggggtcaatagctaaggccaaaccccccagcgacaagccccctggcgacaggcacccagggccctccagcccaagtccgcctctaggtgttcttgttggtgtgctggcacagagcctccaatggggcagaacggccacccccgggaccagtcatacacagatcctggcaactaacaccactgccgtttccaccgaccaagtcttggggtggtctgtcatgcagcaagagaccatggacgtaactggattcctgcctcactcagacacggtggtgggagaatggtgaagcagtcaatgctgaggtctttgctggggctgatggcgctgggaggggccccctcagcctctgaagaaaaagcaaaccccacccggccctaacaccaattcaacccaacctcacctgggaggctgcttccttgtggatctctttccaccaaccggagttcctcagtgtccagcctggaggcagcgtcaggctgggaaagctgataccctgagtggggttaaaaaccaaagaaataaaaggcatcaacacagagtggctgatgggtgttgtgtgtcgtgggccagccagggcaggctgcagcccacctcctcttctctgtactgggacccccaccaaggccacctccctgttaggcccctggacagtggagcaaagaagaaggcgaggctggaagggcaacggggcaggcggaggcaggactcagagaaagcaaagctaaagaaagacattgacaaaaattgctcaggagtctgagtcggggggcctccctaaaaggagggtttctggggcaagaacgtctacaaaagaggagacccttgatcaggccatgcaggtgaggccctgtatctggcaaggagggtggcaatgtgggcgccttggggccaggaggcctttccaaattccgaggcttcagtcctacaggcagggcctgggcagaactcagatgtttagatcagaaagggtgggggcttcagcgaataaattcaagctccaacacgtgcaagttcaaatcctgtaagacatcacagtgtcccagccaaagtccctggggtcacagtctcctgcaccaacccctgcggaaggggatggggagtggggcgtgaccccgaggcaggcgactctcaccccacaggagcagcttccggtagctcttcaggttctcctcggcagggtccaggtggccccactcccccaggtgctgagggtcctctggaaaggacttcagcttctgaaacattagtcgtggctgagacctcccacctgccctagagaagggaggacccgccgcagccccacagccacaggagcaggctaggagccagccctggccagggactctaacccaggtgcactgcaggaggcagcccccttcgcaccacaaagattccgccctcacgctcccaccagggtgggttctgggcctcagcgctgtggacgtttggggccacagccctctgctgagcactggtgatggggagggggatgcctctaagctgaggccaaggcccctcacccacctgctcgtgcccacccacctgctcggtgttggcagggccgtcctcttcggtctttgcttctctgaccctcctctgttccagaaacagggggtccggagaaagccaggctggggagaaggagaggcagagctgaggcaatgagctccctgtggccaggtgccctcaagggtcaaggagcccccgctgcctcccacacaggccccagtgtgcttctgtgacagcagcacccaaggctcaacggacactacacctttccctgatttacaaagcagcgcggtggccacagggcttgggtggccccagagatgcccattcaagtccactggattcatggaaatcttttttttttttggtttgtttgttttttaaagacagggtcttgctctgtcacctaggctggagtgcagtggcatgatcttggctcactgcaacctccacctcctggactcaagcaatcctcccacctcagcctcccaagtagctgggactaaaagtgcggacccggctaatttttgtattttttgtagagatggggtctccctatgttgcccaggctggtctcgaatgcccgggctcaagtgatctgcccgccttggcttcccaaagtgctgcgattacaggcatgaggcactgtgcctggccttcgtggaaatcctaaaaagcaacaccacatagtgctgggctgtatccaggccagtgggcaccttccgtgctggtaatgaacagccacaaaacttctggaaaaccacatggaagtttctattttatgtgaaatgtcgaactcacacaccacttgcccagtggtcctgaggagtccacccacagtgcccagagcctcacatatgggcacacaagtcaggaggtgtcagggcagcttcactccaaggggcagagagcccacctctaggatggggatgggctgagcacgcgatgctgggcaactaaagaaccagacccaaccacagcctgggggacccacccctcgaacagcaagcactcagacacagcacaccacacacacagagcccgaccccaggccctgattatgcatgtgtgatgtgcagggagacatgaggggacgtgcatcaggacacttgagaccctttattttcagagggttcatggtcgggggttgggagattcttttctttatgtattgatgtttcttcactatttgtggtaagtatggatgatctgcataatctctgaagactaatttaataaacaatgtctaacattcagagaaactacaggaggaagtcccaatgatagcatggaccatggagcccctgactccctggctgcccttctgccctctcccaaccacaggcctctgcccaacaccccacctaaggcccagcagaggctgccaggctagctgggcactcacgtgtctcagaaggtgccgggatctccccagctccaagggcctggctggggctcgcgagctcgcctggtagcagcagagggtccatgtgcctctcgtacactccatcgctaagaattgaggatgagcccgcaggggagcccagcagcatccctgtcaacagtggagggacctgtgaccccaagaggtcaggacacgtgccaacaacaatcacacagttaaaccacagggacctgcaggctccagggccacatcactacccatcctgcacctcatcttggaccaggagacctccagcctgcaaagtacccagaatatttactgttaagaggctgggggccgggcgcggtggctcacgcctgtaatcccagcactttgggaggccgaggcgggcggatcacgaggtcaggagatcgaggccatcccggctaaaacggtgaaaccccgtctctactaaaaatacaaaaaattagccgggcgtagtggcgggcgcctgtagtcccagctacttgggaggctgaggcaggagaatggcgtgaacccgggaggcggagcttgcagtgagccgagatcccgccactgcactccagcctgggcgacagagcgagactccgtctcaaaaaaaaaaaaaaaaaaaaaaaaaaaaaaaaaaaagaggctgggctgggtgtggtggctcacaactgtaatcccagcactttgggagaccaaggcgggcagatcacgaggtcaggagattgataccatcctggccaacatggtgaaaccctgtctttactaaaaatacaaacattagctgggcatcgtggcaggcgcctgtaatcccagctacttgggaggctgaggcaggagaattgcttgaacccaggaggtggaggttgcagtgagctgagattgcgccactgcgctccagcctagtgacagactgagactccgtctcaaaaataaataaataaataaataagtaaataaaagaggctggtccctttccctcattcctctggcttccttacatctagaaggcaggagcccaggcatctgtcctggcccgaggaccaaggagctgcctcagcagtgtggggaacttaactatctcaggcaagccatggctggcactggggccttccaggatcccctccccatctcctctgagccatgcttctcctctgtgacagcccacctggctcttccaggacatcagcgaggccctccaccagggaggctgccttcttgcagctctcagggtactgtgccaccacccagggccggaccttatcaggcaggatgcccaggaactgctccagcaccagcagctccagcatctgctccttggagcgcgcctcaggcatcagccactggcggcacagctcatgcagccgggccagggtctggtggggcccggcagcctcctggtagacaaattcccggaaacgcaggcgggagaactccaggtcagcaggggtcctctcagggatggtctcgggttcttcctgctggactccggctgctgaccccggcgtgggcagatccggcggggctggggagctcctgggggaggcaaacgccttctccaaaggcaacatctttccaaaacggcactggaaaatgtgactgtctagccagggacaaggtggctccaaaggagaggtgccagggatgaccagatgcccagtgggctcaggtggtgccagaacccacagacctgcagaggacacggacaaggcaatggccttgcataaggccagggcgcagccaccccagctgccagagaacaaagacaccacacccagagttcacacagatttccaagaaacccgcttgttaggcatcagtagaacctcagtgttgtactcatgtagataaaaagtagcatgtaaatggagggtaactcattctgtgcattaccagaatttttttttctttgagaccgagtcaccctctgtcacccaagctggagtgcagtggcgcaatctcggctcaatgcaacctctacctcccgggttcaagcgagtctcctgcctcagtctctccagtagctggaattacaagcatgcaccaccacacccagctactttttgtatttttagtggagatggggtttcaccatgttggccaggctggtctcaaactcctgacctcaaatggtccacccgcctcagcctcccaaagtgctgggattacaggtgtgagccactgcgcccagcatcattaccagaattttaaaaaatcagtcatgaataggatgaaaatgaaaaattacttgacaatctctatgtaaacctggatgtaaaaaccttgaaataggccaggcgcggtggctcacgcccataatcccagcactttggaaggctgagatgggtggataacctgaggtcaggagtttgagaccagcctgaccaacctggtgaaaccccgtctctactaaaaatacaaaactagctgggtgtggtggtgggtgcctgtattcccagctacttgggaggctgagacaggaggactgcttgaaccctgaggcagaggttgcagtaagccgagactgcgtcactgcactccagcctgggcaacggtgagactctgtctcaaaaaaaaaaaaaaaaaagatagattatagggatgtcaatttctaataacatgaaggagctaggtgtcaagactgttcctccagttaaaaccaccacaaatctgaaataaaattatttagaaaaaagcgtagggagcggggggctccctctggaggccactgaacaaccacccacctccccgtttctggaaatggtgcaggatgtaggctttgaccaaagcatccacagaaccaggcgggaggggcaggaagtacccaggagcaaggacaatggggggtggggggtgggggagaccacaatgactgagagagttcaggtcctgccaacctgtgccccaccctcagctgaatccccacatacagggcagccctatcattaagtgaagccagtattcaggatgaactctcttgattgtaactgtgcaccaacaatgagctcactaaacagaacccagcgggtcacagctgtccaggcctccagtcggcctcgggctctcatgtcactggctatggacacacaagggtgtgaactgcagctgtccaccttctcccaggaaccgcctgggtctgaaggtccacagagacagctggaaggggatttcccacagccgcagcaagcccagttttatagggaaaaccatagagtaaaccacaccaggccaggtgctgtgagcccttctcaggtcgtcaagttctgctctgacagtgctccaccagaatatggggcgcaaagacctcaccgctgtggggtggggtgtggtgtgtgattccacagaaatgaaacatctagaacaggcaaatctatggagacaaaatgtagatcagctgttgccaggggctggggtttgggggaatgaggagggactgctaatgggtacaggatttcttctttggttggtgaaaatgctcaacggtgagtactgcatattaaaaaccaatgaactgtccactttaaataggtaaacctcacagtatgtaaattacactcaataagctgtttaaaaaacaaaacaaaacaaaaaaacagggctgggcacagtggctgacgcctgtaatcccggcactttgggaggccgaggcaggcagatcacctgaggtcaggagttcgagaccagcctggtcaacatggtgaaactccctctctactaaaaatacaaaaattagctgggtgtggtggtgggtacctgtaattccagctactcaggaggcctgaggcaggaggatcgcttgaacctgggaggtggaggctgtagtgagctgagatcatgccactgcactccagcctgggtgacagagcgagactctgtctcaaaaaaaaaaaaaaaaaaaagaaccagaagtttgcagagagtcaactatcaacctctctctctgtggctaccagagtttaaagggaagtgcggaactcttaagtgctgttggaagacattctacacaagcttccacttacctcaagcagaacagagccatgccgtgccatcatcaccaccaccacgatacctctactttttttttttttttttttaaacacagggtcttactctgtcacccaggctggagtgcagtagcatgatcatagcttattgcagcctcaacctcctgagctcaagtgatcctcccaccccaacctcctgagtagctaggactaaaggtgcacatcacccacacctggctaatttttaatttgttttgtagagacagggatctcactatgttgcccaggctggtctgtaacttctggactcaagggatacgcctgcctgggcctcccaaagtgctgggattacaggcgtgagccactgcacccacccccacccttttgttacctcataggcctgagctctcaactggcccctccgggagacttttcctctgcactccttgcacgcacccacctgacacccgctcactgcccccgccttttacctccctactgaccgcctcccccactggaatgcatacccaggagagtaagggttcttcacaggcaggtcccttggcctgggcagagctggctcagtgtgtgtggactgtgcaaacagtgcagttctgctgaggggtatgctggctgtgcctcatttgtttttggcagttgtggaccctcatgtccatctctgtggggtcctttctgatctatttaaaggacatatggagaagcaggatagctagggcacaggggacaacctcacgaccgtcacctacttatggcagcccccaccggggtgccctctctcctcacacactccacctgctgccagaggaccctcagacccaagcatctgcctgctctgtgactgagcgctttctcatgatttaatctctgagggcgggtaaactgcccactttcccgtgactttttctttacagctctttctgtcaaccagttaacgagttccctgtctggctctatcttgctactgtccccatctgtggcttgtcttttcactccacgctgtcttttggtcacaggtaatgtcctaatgtttcttactatctaatgcaatcacttttttttttggagacggagtctcgccctgtcacccacgctggagtgctgtggcacaatgtcagctcaccacaacctccacctcctgggttcaagcagttctcctccctcagcctcccgagtcactggggttagaggcacttgccccatgcctagctaatttttgtatttttagtacagacggggtttcaccatgttggccaggctggtctcgaactgctgacctcaagtgatccacccgcctcggcctcccaaagtgccaggattacaagagtgagccactgcagccagccttcaaccattttttaaattggacttcggagttcagaaacccacttaaaaagggtttctttcccttgggattagaaatacatcctctcctttaggaggccaaggcaggcagatcacgaggtcaggagatcgagaccatcctggctaacaccgtgaaaccccatctctactaaaaatacaaaaaaaaaaataataataattagccaggcatggtggcaggcgcccgtagtcccagctactcaggaggccgaggcaggagaatggtgtgaacccggcaggcggagcttgcagtgagccgagatcgcgccactgcactccagcctgagcgacagagtgagactctgtctcaaaaaaaaaaaaaagaaatacatcctcttattcatcctccaggaacagagaatagcagatataaagggccagacagtctcagtttcaactactcaactctgcctcgtggcaagtaagcaaccagagccctgtgcgtacccacaggtttggcatgttcttatgcatcttcatttacaaaaacaggtggccaggtgtggtggctcacacctgtaatcccagcactttgggaggccacggtaggtggacagcttgagcccaggagctcaagaacagcctgggcaacataccaaaacttcatctctacaaaaaatagaaaaattagctaggcacagtggtgcatgcctgtggtcccagctactctggagactgaggttggaggatcacctgaacccaggaggtcaaggcttcagtgagctgtgatcacaacaccacattgcagcctgggtaacagagtgagaccctgtcgcaaaaaaaaaaaaaaaaaaaaaaaaaaaaaattagccaggcgtggtggcacacacctgtggtcccagctacatgggaggctaatgtgggaggaccccttaatcccaggagttggaggctgcagtgagctatgtttgtgccactgtactccagcataagcgacacagcaagatcctgtctctaatgaatacaaacaaaacaggtcactgctggcctgcaggtgggtacgctaacccctgttctggagcctctcctgatgggaggcgtgacgccagctctaccccctggcaatggaggcacagagctctacttggtgcatggacagaggtgtggtcctgcaggcatgtaattttggctttcttaggacgccagaggcttgttcaccttgcagagaacctgtctccacaaaacaaactgtgagctccataatgtgtgtgcacagaaccttccctcatcagaacctcacaatcccagaggggtaggaaccacatgcagccccaaggtgcaagtgggaaatagaggcacgaggcaggcaatcactaaggctgggaccccacctgcaaagtgacgctgccactcatccttccccgtccaggcccataagcctgccctttaagaggcctcctgccggccctcccctctagccctcatggcctccacagtgggcagatcccagccagctcccccagcccctctcctcctgctccaacttcccagctctgagcatggtggaggcatcggggtctaggtagaatgagcaagggtcctcggccattggcaggggcgggatgacgtggggaggacgggacaccctccggctgggtcactggccaagacagtgggggacacatgtcagcccctggggacaggaacgggagctcctcgcctctgtgcccttccccctcagcattacaagttgtgagcctctctgggaagccacctctgcctccacttcctccattcacctgcaaagcagaagcttccatggaaccaggggtctcctaaaacgcccaactccaaggaagctgctgcctcctgtgaaaacagcctctccctgttcatctcccttcctactgggaccctgatgctcacagccaggaggatgaggccatctcaagagcctccagaaatctctggccctgtgtcttcttgcctccttcagccccattcctggccacactgtcaagaggactctcagagatctcaccggggcaggtgcggcagcgtacatctataatctcagagcctggggagtcttaagcaggaggactgcttgagcccaggagttggaggctgtgattggccactgcactccagcctgggcgacagaatgagcccgtgtctcacaaacaaacaaaatagagataccactgggaccctttcctgccacagcctgcttgaatgaggccacacctcgttggagtctggcttggtcactgggcaaacctccctcccctaatcttgggactgtccaggatttgcctcagatgggattttcctggagcccagccccccagcctcagcaaatgaagcaatctgcacaagtcttgagccagtcctgtaggctttgctgcacccagaggcctggaatacagaagctgaggcagagagctccacggtgggtgaggggtggctgagctgaggggtcccaagcctggtgggtctccagagtcctgcagcaaatccccttcatcctgggctgagcagagctcaagcctggtttggccctccgtgggcccagccctggccacctgaggaatattcatcgcagctctccatcccaccacactcatcggcagggtctagcaaaccaccccacagccacaggcctgaggatcagccagggaagctcaatgcatgggatgtggttgttgatgggtcgccggatattcccagggtctgccctggcttcatccacagatcacttactcattataaaaaggggtaaaagtgcttttaaaagaatgaaaaaacatggagtaagggtcgtcgttcacatctcagctgccttttgtggtccctgatccactcgccaggacagacagaaccagagagatgtcctgcgcaactggcctaggctccccgaaaacccgaggccagaaatacccaggaagtcacagattcaagcatcatgcacagaaaacagcaactcgatgcgacacgtggtcccgctctgactccagggcaggaaaccatccgcaggacatgatgggatgggggaagtgaaatggaaccgaggaggtgacatggaaccaagtgactgtgccactcagcctcgcccaggagtcagcaaggacacaggcgaatatatgggaaagtggaaggagggcagacagaaatgggggaagcggggagggaaggtagcagggagagagaagacaggagaggaaggagcaagagcagggaaagccagatagtctggacgggggtagagggggattgggaaaaggaaggagcccaggagggtgagagaaaggaaatggggaaggagtgatgggagggtgagtcaggcccccaccccaaccccctgggtcaggaccgaagccagtacacccactcttgcctcttccacgagagaggtctccggggtgggcgcagacacctaactcaaacagaacccacccccaggtgactggggagaggcgagatattccaagggtgggggcagcagagacaatgcccattctaggcacccctttggtccccgcaccctccatcccttccctgctccagcccctggggccacagcctgcccagcgtccccccaccacggacaccctcacatcctcacaccctcagcccccacttcctcccctcctcttcccttcaggagcctccccctcccttctcttccccactcaggagcctccccctcccccttttcgcccccctcaggagccttcccctcccccctttctcccccatcaggagcctccccctccctcatctctcccccatcaggagccgccccttcctgttctcccacccacagggtgccctaagcgcctcccctccacgagcctacacggggtgggggttgcactagttccctacctgcctgcagggcccctcaccgatctggatctcagccacctccggggggacccggcccctgccccgcactccacgcgaagggatgccagaccctcggcctcctggacgcacagcgggggctcgcaccccaaccccgggaacaccctggcccctttccctaacgctgcccactgaggcgtcctcaccgtctaccctgttggggtcgctctctgacccccgcgctgcatccccgggaccgacccacctgctgcgcagctaccccaggccggtcccagccgcccggagccccagtgcgcgatggcggccggcaaactgcgcctgcgcactgggcctcaccgcggactacgactcccacaatgccgcgaggctgtgccgcgcaccggggcgagcaagggagccgtgacaggtgacagtgcgcatggccaatcagacgcgagtgtggcctcccggcgtcccgcccactccggcgcctgcgtcattttgggcaccatggcaacgaagtaaacaagcgggtaaataatagacccctgacagccagagacccggagaaacaaagacggtgagaaacggagaaacaaagacaaaaagacgcgcagaccgggagggagagaagcatgaaggcccacagacgctcgggggcagaccaagacgccctggggtccccgaaacagagatgtacagagtcggacacggaaagggagagaccagctcacggttaagaaaggagggagaccagcccaggatcaagaaagggaaagaccagcatgggctcaagaaaagaaagagaccagctcaggctcaggaaaagagagagacccagagaaaaggagcactcgaggctgagacagatctggacagagatacagagacagggaccagcagacccagtactggggagacaagaggtggagacccagagacactgatgcgctaaaatgggttctacagtttcaaggagtggatagaactcaaagattacccaccccagggattcaggagctgctgaaatgagggaaatgtgagtggcagctggggtgagggctttggcaaagccccatataaatgtagcccccctggaaggcaggatagggccaggagctgcttcccatttcagttttccagatagaggcgcttatgaggatgccattttggtcgtttttgtgtgaactgatttttaaaatgtatatctgaacagtttatatattttaaatttacatacaccacacattttggtattcagttttatgaattttaactcatatccaccaacaaactcgggacaaagaatagctccactgcccaaaaatcctcctgctgcctcttggtagtcactccctccccacccataaccccaggaacagctaatctaagtagtccactgctacaattttgccttcacagtgtcatataagtgggatcatacagtatgtggcctcttcagattggctttttcactgaacataattcctttgagaggcattgaagtagtatgtatcaacagttcattccattttattgagaagtagtattctatggtatatagcagtttaaaccttctcccactgagagatattaggatcgttttaagtattttgctattaaaaataaagctgctatgaacattcgtgtacagatttttctgtgaacgtaagttttcacttttctgggataaaagcccaagagtgcagtttctaggtcacacaatgaacacgtgcttattagtgttgtaagaagctgccacactctcatgcagagtagctggaccattttacactcccaccaccaatgaatgtgtgaatccacttcacatttttatcagcatttgtgttttgctattttttattttggccattctgataggtatgtactgatatatcattgtggtttcaatttgcatttcccttaattgctaacaagtttgagcacactttaatgatttttttggcatttgtataccctcttcattaaagtatctgttcgtatcttttgcccattttctaatttttaaaaaaattgctcagttttgaaagctatgttttttttttttttgagacaaggtctcactctgtcactgaggctagagtgcagtggtgccatcatgaatcactgcagccttgaccttccaggctcaagtgatcctcacctcagcctcccgagtagctggaactacaggtgtgcgctaccatacccagctaatttttttttttaagagatggggtctcactataatgctaaggctggtctcagacccccgggctcaagcaatcctcccaccatggcctcccaaagtgctgggattacaggcatgagccaccatgcccagtctttccagtttattttaatggatataactcaggaactgccaaatggaagagatgcacagctaaggtctggtcaggggcactgaaggtgcagtgcatccatgtaccgtctgggtgagccatcctcccagcactcagatgtgttcaccaacccagctctctcaatcgtggggcagagagagggtccataccttctttaaggtgactatccccatcctgaagatatctatgggtcccactggagtcacctcattagcataaactcaggtgtggtcgaaacgggctccttatgaattgcaaaccctattcctattattcacaaaattccaaggcttttagctctgtgccaggaaccagggataaagatcaaatgtaagggccaggcgcggtggctcatgcctgtaatcccagcactctaggaggccagcgggcggatcacgaggtcaacatggtgaaaccctggctctactaaaaatacaaaaattagccaggcatggtggcaggtgcctgtaattgcagctgctcgagaggctgaggcagcttgaaactggaaggcaggggctgcagtgagttgagatcgcaccactgcactccagcctgggcaaaagagcaaaactccatctaaaaaaaaaaagaaaaaagatgaaatgtaggttttattacaccacagatggccaattgttcttgcaccatctggaaaaggctatctttcctgcattgaatagcttttgctccttaaaaaatcagtcaggaatatctttgcaggtctatttccgggttctcgattccgttccactgatctatgtgtctgccaataccacattgggttaccacggctacagagtaacaacatcaggtgcagttattcctcccactttttttttttttttttttttttttgagacagagtcttgctcagttgcccaggctggagcgcagtggcgcgatctcggctcaccgcaagctccacctcccgggttcacgccattctcctgcctcagcctcccgaatagctgggactacaggcgcccgccaccatgcccagctaatttttttttttttttttttttttgtatttttagtagagacagggtttcaccatgttagccaggatggtctcgatctcctgacctcatgatccacccgccttggcctcccaaagtgctgggattacaggcatgagccactgcgcccggccactttttttctttttcaaagttattttaactattccaagtcttgtgctttcccatatactttatcttcttcttttttttttttttttttgagacagagtcttgctctgtcacccaggttggagtgcagtgatgcaatttcagctcactgtaaactctgcctcctgggttcaagtggttcttctgcctcagcctcctgagtagctgggattacaggtatgtgctaccatgcctggctaatttttgtatttttagtagagacggggtttcaccatgttgaccaggctggtctcaaactcttgacctcaggtgattcgcccaccttggcctcccaaagtgctaggattacaggtgtgagccaccgcacccagccttttttttttctttgttttttgagacagaatctcactcctaaccatgctgctaatatttacatggtcctgcaccagtgtgttcatgtaatttcacataacttttttctttaattagggttgagtttcctatataggccttctaagcagccagagatcacacacttaaatgagcacctattagcttccaggcatattatgttttcttttataaataaaagcctcaaaatgcacacatgcatacacacacacacgattactgaccaaaaggtatttcagtataaaagctagagtagaagctccataaggacggtgacttttccctgtttaggcagcttactaaaaaaccccatatactcagccgggcgcagtggttcacgcctgtaatcccagcaatttgggaggccgaggtgggctgctcacgaggtcaggagattgagaccatcctggctaacacggtgaaaccctgtctctaccaagaaaatacaaaaaaattagccgggcatggtggcgggcgcctgtagtcccagctactagggaggctgaggcaggagaatggtgtgaacccgggaggcagagcttgcagagagccaagatcacgcaactgcactccagcctgggcgacagagcaagactccatctcaaaacaaacaaacaaacaaacaaacaaacaaaccatatactcttctgtgctgtttggcttccccccacattatgaactttaaaaatcttgcaataaaataacaattatggctgacacaggctataagaaagaaggcaggtaacaatgattattcagcaaggtaggaaggactacaatggcacacagacttgccattttgtactgcatcggatatgtcaatgttaattgtcatctcagcaacaagattttttccttgagagttgtatttctcctcaaatggactctcactagtcattcaattcctccttctgatattactcttatttcattgattccaagataacagatggtaacatgtacattttatgtgctaataaaaggctgcctgaggcctagcacagtgcctcacacctgtaatctcagcactttgggaggccgaggtgggtggaccacctgaggtcaggagttcaagaccagcctggcaaaacctcgtctctactacaatacagaaattagctgggtgtggtggtgtgcacctctaatctcagctacttgggaggccgaggcagcagaatcgcttgaacctggcaggtggaggctacagtgagccaagatagcaccactgtactccagcctgggtgacacagcgagactctctctaaaaaaaaataaaaaaataaaaaaaggctgccaattaaaccatatcactgattaacctggtttgttttcagatgttaaaatatggcaagatatgtatcacagaataaaggaaatacggtaagtctttaggttctgtgtcacgactaacttccagatataggcattaccttgttttcttgcactttgcttaattatcctatgcagatattgcattttttacaagttgaaggtttgtggcaacctgtgtcaattaagtctattgtcaccatttatcaaacagcatatgctctctgtgtctctgtgtcacattttggtaattctcacaatacttcaaactattgcattattattatctgttatggtgatctgtgatcagtaatttttgttgtaactattgtaattgttctggagtgaaaggaaccacgcctatataagacaatgaactcagcagataaatgttgtgtgtcctgattcctccaccaacctgccattgctcgctggtacgcactctctctcaatctctttcctcaggcctccctattccctgagacaaaacaatattgaacttaggccagttaataaccctacaatggccactaagtgttcaagtgaaaggcagagtcagacctctaacttcaaatcaaaagctagaaatgattaagcttagtaaggaaggcgtgtcaaagacaggccaaaacttagccctcttgtgccaaacagccaaattgtgatggccaagagaaaaacttgagggaaatgaaaagtgtgactccagtgaatatgtgaatgacaagaaactgaaacagccttgtcgccaatagggagaaagctttaatggtctggataggagatcaaactacccaaagagaactaacattctcttaagccaaagcctaatccagagcaaggtcctgactctcttcatttctatgaaggctgtgagaggcgaggaagatgcagaagaaaattctgagccggccaggcacagtggctcatgcctgtaatcccaacactttgggaggccaagcgggatggatcacctgaggtcagcagttcaagaccagcttagccaacatggtgaaaccccacctctactaaaaatacaaaaattagctgggcatggtggcgtgcgcctgtagtcccagctactcaggagtctgaggcaggagaattgcttgaacctgggaggcgaaggttgcagtgagctgagatcgtgccactgcactccagcctgggcaacagagtgaggctgtctcaaaaacaaaacaaaacaaaacaaaacaaaaaaaaagtctgggccgggtgtggtggctcatgcctgtaataccagcactttgggaggcagagatgggcagatcacctgaggtcaggagtttgagaacagcttggtcaacgtggcgaaaccccatctctgctaaaaatacaaaaaaaattagccaggcatggtggcaagtgcctgtaatccctgctactcaagaggctgaggcatgagaattgcttgaacccaggtggcagaggttggcagtgagccgagatcatgccactgcacactagcctaggcaaaagagtgagactccatctcaataaaataaaataaaataaaataaaataaaataaaataaaataaaaaagtctgaagctagcagaggttggttcatgaagtttaagtcatctccgtaacataaaagtgcaaggtgaagcagcaagtgctaatgcagaagctgcagcaagttctccagatttagctaagatcactgaggaaggtcgctacagtagacaacagtttaaatgtaaagaaaacagccttctgttggaagaaatgccaggtagtgttttcacaactagaaagaagtcagtgcctagcttcaaagctttaaagaacaggccgactcttgttaagggctaatgcaactggtgactttaagttgaaaccaaagctcatttaccattctgaaaaccctagggccttaagatttaagttaaatctactctgagtgctgtctataaatgtaaacaaagcctggatgacagtacgtgtttacagtatggtgtactgaatattttaaacccactgttgagagacttcctcctgagaaaaaaagattcaaattatggctgctcactgacaagagctctgatgaagacatagaaggaaattaatgttgttctcgcaactgccaacacaacgtgtattctgcagcccatggaccaaggagtaataattttgcctttccagtcttcttatttaagaatgcagtttagctggcccaggcgcagtggcctgtaatcccagcactttgggaggctgagacaggtggatcacgaggtcaggagatcgagaccatcctggctaacacagtgaaacccagtctctactaaaaatacaaaaaattagccgggcgtggtggcgggtgcctgtagtcccagctactcgggaggctgaggcaggagaatggcatgaacccggaaggcagagcttgcagtgagcagagatcgcaccactgcactccagcctgggcaacagagtgagactccgtctcaaaaaaataaaaaataaaaaagaagaatgcagtttgcagctatgcgtggtggctcatgcctgtattcccagcactttgggaggttgaagcaggtggattacttgagcttaggagtttaagactagcctggccaacatggtgaaaccctatctctactaaaaataaaaaattagccggccatagtggtacatgcctgtagtcccagctactcaagaggctgaggcatcaggatcgcctgaacccaggtggcagaggctgcagtgagctgagatcgcgccactgcactctagccgaggcaacagagtgagaatccttatcaaaaaagaaaaaaaaaggtatgtattttgtaaggctatagctgccatagatagtaatgattccttggatggatccagggaaagtaaattaaaaaccttctggaaatgattcactatgctagatgccattaagagcattctaggccaggcacaatggctcacacctgtaatactagcactttgtcaggatgaggcaagaggatcacttcggcacaggagttcaagaccagcttgagcaatatggtgagatgccgtctctacaaaacataaaaaaaattagccaggcgtggtggtgcatgctggtagttccagctatgtaggaggctaaggtgagaggacaacttgagcctagaggtcgaggctgcagcgagccatggttgcagcactgcactccaacctgggcaacagaatgagaccatgtctcaaaagaaaaaaagacatctggctgggcgcggtggctcacgcctgtaatcccagcactttgggaggccgaggcgggcggatcacgaggtcaggagatcgagaccatcccggctaaaacggtgaaaccccgtctctactaaaaatacaaaaaaaattagccgggcgtagtggcgggcgcctgtagtcccagctacttgggaggctgaggcaggagaatggcgtgaacccgggaggcggagcttgcagtgagccgagatcccgccactgcactccagcctgggcgacagagcgagactccgtctcaaaaaaaaaaaaaaaaaaaaaaaaagaaagaaagaaaaaaagacatctgttttttttgtttttttgtttttttttgaaatggagcctccttctgtttcccaggctgcagtgcagtggctcgatctctgctcactgcaacctctgcctcccagcttcaggcaattctcctgcctcagtctcctgagtagctgggattacaggtgtgcaccatcacgcctggctaatttttttttgtatttttagtagagatgaggtttcagcatgttggtcaggcttgtctcgaaatcctgacctcgtgatctgcccaccttggcctcccaaagtgctgggattacaggcgtgagccaccgtgcctggccaagacatctgttcttgaataatgagactggaaagtcaaaattactcctgatctatgatgggctgcagaatacatgttgtgttagcaggtgtgagaacaacattcatctccctgtacatcttcatcacagctcttgtcaacaagcagccatattttgaaaggaatctttattctgaggaagtctcaacagtgggtttaaaatattcagcacaggccgggcatggtggctcatgcctgtaatctcatcacttttgggaggccaaggtgggcagatcacttcaggtcaggagttcaagaccagcctgaccaacatggtgaaaccctatctctactaaaaaaaatacaaaacaattagtgtgatggtgggtacctgtaatcccagctacttgctcaggagtttgaggaaggagaatcgcttgaacccaagaggcagaggctgcagggagctgagatcacactactgcactgcagcctgggtgacaagagtgaaactctgtctcaaaaataaaataaaatattgagtgcaccatgcggtaaacacatgtgctgtcatccaggattttttcttccatttatagatggaaaaacatatttgttactttcaaacaacataaactcttcaacatgaagtctctgacaaagaggaggcaaagaaaatcagatcagtcactgccacagatgctcactgaatccccataggtctcagtccaatgtgtcaactctggtttctagcgagagcacagatacttgggaaaactttcccacactagacacactggcacaaggtcgcctgagcatgtaccttcttgtgcttggtcagacaggagctgtccctgaaggctttgccacaccgattacactcgtagggcttctcaccagtatgagtcctctggtgccagatgaggcccgcgatgttcctgaaaagtttgacactggttacagccacagaccttctcaccagtatgaatcctcttgtgcctgatgaggtacataatctcagtgaaagattttttcacattgtttaactcatgagatttctttccagaatgatttttttgatgcaaaagagctgactgttgtggttggagaatttttcacactccatacacatatagggtctctttccaatgtgaattctcccatgtttaataagttatgtgtgatcaatgaaggcctttctacacccagtacatacatagggctcccctcacatgtgaattctcagatggacaataaggttggagacatcagaaaaggatttttcacattcattacattcgaatagtttttccacagtatgacttctgaaatgcaaaacaagggaagagtggcagctgaaggtcttcccataccaattcctttcacagggcttctttcctatgtgggttttctcatgcttggtaaaggtggagccagcactgaaggctttcccacttcttgcatttataggatttctctcctgtgtggattttttgatgtacaatcaggttgtaattcttagagagggattttccacagtcattacaggtataagggctctctccagtatgagtcctctggtgactgatgaaatgagatttcggtctaacggacagtccacattcactgtcattgtattcatttccagagatacttccattgtgttcataaggacatgtgtccctatcaaacacctcctcgtgtccttctcctttgtgttgttcctttctctggcaattacatgttgttcactaaggtgtgtagaaaggctgaaggagttaccaccttcgttacattttgaaggctcatctccttgttagatcttcatcaaggtggctaggttgtccaccctggctgatggctgctctacagtcatcattttcctcaagaatttgaccgttagagcctttctgacaattatgtatgtaactaaaatgtttaacctttgagtcatgttcacagaaacctgttgtttgaggacctctttgacatgaagctaggactgagcagatgaccacaatggtcatggtgaccacagcccctcatagatgctctgggtccttgtgtgtggatgctgtttgcctcaaatgcacctctggatttctatggagcatttctacctggtcctcacattcccagacctctcctaatgcagataaaacaggaatcatccctgatgaacctttttattttcaccaaattggatagttccttcccaacaccatcccaagttgatgcttccatttgacttttgtttcccaggctggaaaggaaaaggggaaaatttttgaatccttagagaaaaaattgctagagttagaatggtaatgtgtaaacattaaaatcagccaggccagtatctattatatctgatgctgtgcccattctgtgacacagcaattccacttgcaagggtacaatcaaaagaaatgtgtatgtatgttcatagaaacactctttctaatagcccgagactagacactatccaaatgtcaccaactgggaaatggaaaacttgtggtttacttacatgatgaaataccacacattaacaaaagtgaataaactaagagtacacaaaaatatgggtacatttctcaggcatattatttgaaagaggaagtatatatactgaaagtgcacagtatatttactttgtgaaaacttctagttttacatttatgtattttttagcatgtatacttccaggaaaagcttttacaaaatcatatgtgcacacacacacacatcctaccaaataaattagccagatttttaaaaaattaacatagattttttttcagttatacacctgcatggtaggaagagaatataaagatggatgaaggatagtgaataaatatcactttagatattatgatttttaaaaagggacaggttctggttatgttgcccagcctgaactcaatctcctaggctcctcccacctcagcttcctgagtagctgagaccacaggtgcatgttaccactcacagaaaattttttaaaaattattttttgtagagacaagtctcactatgttgcccaggctggtctcaaactccttgcctcaagtgctcctccggcttcagccttccaaagttctgcaattacaggtgtgagccaccatgcccatcctctagctgtatttctgaagtcccttcactgagaagaacttgatctccaactgtccccaagatgcttcttcagtgtctcctgatgctttgcttttctgtctatccaaacagaaatcatcttccactctcctctccactcccattaccattcttccttcacctgtcccacccactcggcccctctgaatccagacatgcatactagactgtccaggcctcccaacccactcggcccctctgaatccagacatgcatactggactgtctaggccacccaacccttagagatctgcccatcattacaccctgaagagaccaaaagctgtggcatggcccatgctgcttctccctgagtcttcccaatcccagtaaacagccatcccattttctcagtggaagaggccagaaacctgctccactgggatggaacatactccattctccactctcccttttctcaaaagtcacacctaagctatcagctttgactttcaaatacacacagtatcctaccaatttacacttcctccaccactgtggtccaagttataatcacccttttattataaattgaagcataatttaaacagaataaattcaaagtggatgactcactgagtctttagatgtattttcatgagtgttcatatgtgtatgcacactccatgtgtgtatgacaatccatgatataaaacatacccatttttaggccaggcacggtggctcacgcctgtaatcccagcactttgggaggctgaggcaggtggatcacgaggtcaggagatggagaccatcctggctaacacagtgaaaccccatctctactaaaaatacaaaatatgagccaggcgtggtggcgggcgcctgtagtcccagctactcgggaggctgaggcaggagaatggcgtgaacccgggaggcggagcttgcagtgagctgagatcgcgccactgcactccagcctgggcgacagagcaagactccgtctcaaaaaaaaaaaattcccattttctggaggtaatcgctgctctgacctccattactacagactgctttgattggccctgaactccatgtgagcaggattgcaccatccacatgctcttgtcttggacttgtcattcaacagtagctctcatggttgtttgcatggttaaaactgaaccccccgaaaaaaattttttttaagacagggtctcattctgctaccctggcaggaatgcggtggtgtgatcacagctcacagtggcctccaaatcctgggctcaattaatcctctgcctcagtctccaaagtagctaggactacaggtatgcaccaccatgtgcagctacttataaagttgtttttttgttttttttttttaaatagagacatggtctcactatgttgtccaggctggtcatcaacccctggcctcaagcaatcctcccaccttgacctcccaaagtcctgggattactggcatgagccactatgcccagcatgtaccaaacaattaaagaagaattaataccaattcctctcagactcttccaaaacaggagggaacacttcctaactcatcctatgaggctagcattaccttgataccaaagccaggcaagcacactacaagaaacctagaaaccatatcccttaaatgttgaattcatcagtgtattacaaggattacacaccacgagcaagtaggactgttcatggaatgcaaggatatttcaacatgcgaaaattagttaatgtaagacatcacaataacaggataaagaaaaaaacacgaccatctcaaatgatgcattaaaagcattggacaaaattccaaacccgacccctgcctttctttactttttattttattttacttttttgtttttgagaccaggtcttactctgtgacccaggctggagtgcagtggtgcaatcatggctccctgaagcctcgactgccctggggtaaggtgatcctcccacctcagtctccccatagctgggactacatgcacaaggcaagattcccagtaatttttgtatttcttgcagagatggggtttttgccactttgcctagtctggtctcaaattcctgtgctcaagcgatacgcccatttcggcctcccaaaatgtcccgattacaggtgtgagccattgcgtctagccccaacaccctggcatgattaaaaaacatactcaaggctgggcgtggtggctcacgcctgtaatctcagcactttgggaggccgaggtgggcgtatcacgaggtcaggagatcgagatcatcctggctaacacagtgaaaccccgtctccaccaaaaatacaaaaaaattagctgggcgtgctggcaggcacctgtagtcccagctactcgggaagctgaggcaggagaatggcgtgaacccaggaggcggagattgcagtgagccgagatcacaccactgcactccagcctgggcgacagagcaagactgtctcaaaaaaaagaaaaaaaagtttaggccaagctcagctgacgcctgtaatcccagcacttgaggaggccgaggggggcagatcacctgaggtctggagtttgagactagcctggccaacatggtgaaaccccttctctactaaaaacacaaaaaattagccaggcatggtggcgggcaactgtaatcccagctactcgggaggctgaagcaggggaatcacttgaacctgggaggcagaaggtgcagtgaaccaaaatcacaccactgcactctagcctgggcgataaagcaaggctccgtttcaaaaaaaaaaaaaaaaaaagaatttaaaggggacaggtcaggatattgagaaacacaattttcacataaacaaaagggtcaagggccaggcgcagtggctcacgtctgtaattccaacactttgggaggccgaggcaggcagatcacgaggtcaggagatcgagaccatcctggctaacacggtgaaaccccatctctactcaaaatgcaaaaaaattagccaggtgtggtggcgggcacctgtagtcccagctactcgggaggctgaggcacgagaatggcgtgaacccgggaggcggagcttgcagtgagccgagatcacgccactgcactcaagcctgggtgacaaagcaagactctgtctccaaaaaaaaaaaggcggggcagaagaaaaatgtggggaatctgcattaggataacacagacaaaatggggcaggggaacaatcagatacgcatttgtgtctgggatgccggggtgactgcacttgtaaagataagctatcaatttgcattgccatggtgaagttttcacaacagctcaccaggaatttctttgtgggcaaaatatgggggaggcatgtagcatttcatcttgtagccaccttatttaggaacaggggaggcaggtttgcttgacccagtttccagcttgacttttctctttgactaaatgagtttggagtcccaaaattcaatttcttttcacaaccgtggtaagacttggctcaaaaataataccataatggctggacgcagtggctcacgactataatcccaggactttggaaggctgaggtgggtggatcacttgaggtcaggagttcgagaccagcctagggaacatggtgaaaccccatctctactaaaaatacaaaattagccaggtgtggtggcatgcgcctgaaatcccagctactcgggaggctgaggcaggacaatcacttgaacccaggaggcagaggttgccataagccaagatcgtgccactgtagtccagcctgggcaacagagagactccagctcaaaaaataataaggctgggcgtggtggctcgcgcctgtaatcccaacactaagggaggccaaggtgggcagatcacaaggtcaggagttcaagaccagcctggccaacatagtgaaaccccatctgtattaaaaatacaaaaattagcacggcatggtggcacgtgcctatagtcccagctacttgggaggctgaggcaggagaatcacttgaacctgggaggtagaggttgtggtgagccaagatcatgccattgtactccagcctgggcaacaggccgagactctgtctcaaaaaaaagatgataataataatgtcataatataattaggaattgggaaattttgaaaaggatgggttatcacatgataacaggaaattattgctcattttcttaggtgtgatacagtattatggttatgcaaaagaatgtctttattcttagaatgtatgtgccaacatatttatgagtaaagtgtcatacttgtaataaatatatatacatgtagacatacatatacttaaacacatgcacacataatacatatacgcacagataaatatacaaatgtacattatataaatatatacacaatatacacatacatatatacatacaaaaatacatgtatacacacatatgcccccaaatatataaacaagtatgtatatatacacgtatgcacaaatatacattaataaatatatagtgtgttatatattacaggcacataaaacaaatatggcaaaatattaattggtgaatctcggagtgggtgatgggcattcatgatactcttttttctcaacttttctgttagagtatttcagaaacttgtcaaaatataaagtaggcaggggaaatataaatgcctcctggagagatattccaggatcatcattcattaacaccttggtgaggtgaacttataacaggtttctcaaaaggcattcaagagacggttgtaagtgttcaagggggaaaaatatgatgctagcgctagaagctgttaaaaaacaactatggagttaccaactgggaaaatgctagtttgtaaggccctttccaggcaataggttttgttgcaggacactaaaggaaggccagaagtgtcagccactaagaactggagtcagggcaaggcagagctatccaaagcactcacaggttcctggggcaaaccctggaatcaactggccctctagctgctcccagtggttggcagctgatccaagttcaatcctatttaatctgtttgtgagctaaatattgtttctgagaagacaagtaagtgaaaatagggcaaatataattctattctggattcaacagggagcttactatttaaataaaacttcaaattccatttaaatattttatattaaagatatcactgcagaattaatgcatgttcattgcagaaaatctggaaaacataaataagtacaaagacaataaaaataatctataatctcactgttgagccttgggtgcatttacttcctgttttcttcacagagaatcattttgaaacaggtggagtcaacgtgtgtatataacttgggtccttttttgtttttcctagttaacattatattacgggtagttcccacaacattaacatgtctttgttagtataagaaatgccacagcctctctgaagaacaattcagaagaactaggttgaaataaaaaattctaaatgccaagagatgtggtggatccacactggcatcctttttacaatgacaaattaaaattcaaaagtagtatcagaggatctcacatttagcaagcgtggtttcatcaaacttttgttacagttagtatgcatgcaagtcatcatgtacatgtttctctcaatgcttgtgtgaaaattttgaaaacctacaggctagaaaaacccttacaaggatacacattcaacttgcctccctaaagcactggtggaaacgctgaaaacctggaaacttccaagatgttcatcaacaggaaaggcaagacaaaaaaaactgtggcattttcacaaggtagaatagtatagagcagtgaaggccggtgtactgaaagcttcacctagtacaaggttggggagagaagaaggttgcaaagtcttgtagcacataaagcatgccaatttcaaacacacgcacgcatgcacacacaaacaccccatactccatattgcccgaggcactggatatcacaaaggaaaaaactctaaaaaaaacccccaaaaaacggcctgggcacactagataaatgtgcagtgaattcatcacacaccccctctgtgatcttaagtctgtgggaaaagggccagcttcctgtggtcacaaggatggctctttttctttcattctgcaaacatttactgaacacgtactgtatgccaggacctgttctaggtatcaataattcagcagtggatcagacagatgaagacctccacctcacagagtaggcattctggtatgggaataggcaaagaactgcagaatctgtcactatcaaacgctctgcaaactgaggaagcacatacctgcaatccagtttctgagttacagctcctttcccaaaccgtcccaatctctatccactgcccacaactcaaaagccaagcaacctcagagaatgaactgccgaaggaagaagctagggcacggaatttcacctgatgcaagctccatcatcatcacctgcaacccagcagcaaacagtccttagcctagcagccccagtcctagggcatgtgaggattctgcctgttactgagtaaggagagtgtttagaggacagatgtgacctgacaggcttccactgaatcgtgaggaggccagaggcacgggagcaaggagatgcccgtaccagagagtagaggtgtggtgatgtggctaaattctggaaatatcttttttacttctatttttttgagacagagtctcgctctgtcagtgctggagtgcagtggcatgatcttggctcaccgcaacttccgcctcccaggttcaagcgatcctcctgcctcagcctcccgagcagctgggattaaaagcgcgtgctttaggggacatgtgagatcctctgacactacttttgaattttaatttatgtcattgtaaaacgcccagctaactgaattctggaaatatcttaaaggttaagccatgggattttggacagagacgatgtggggattggggaaaagagaaatatccaggtggacaaagaggattgtgggtggagggagtcaccacttggagagactagaaagactgagtttgggggagagtagatgctcagctgaggatcccaaagtctgagaggcctgtccctgggggtcagcattcgggcatcagaggtttgtggagagggcagcccagtatacaaccgcagggaagggaggaagggcaagtcagtggagtcagaacccagcagggatgggaggaagcctggctgggaatgttcacagtgggtaggaaggggaaggaacacacaaccctaaaggggcagaggaggaagccatctcttgggataaaggagaggaagaacagggttgttaggaggagtaggatgaaaagtggggaaagcgtccttgggagtaagacacgggaagcagaataggttgttcaagcccaaatcttgtgaggagaggcagaagggaggggcgtccgcacctgtgcaggaagagaggaggggtccataccctgggaaggtgagaaaaggccatctgtgcccgcaggaaaaaaaaaaaaagagaatattggggaggctgaggttaagggacaggcgaaaaaaaaaaagggatccgccccagtgggagggtagaggaagagaaatgagcccccgccccaaagggggcctgcgcccactaggagagagagttagagggtccgtgctccacagggcgaagggagaggaaattcggagttggcaccgcactggggagaagggtatgggggcccacgcccaacgaagaggagggagtaggggtccgcgccccaccacgaaaggagagtagagggctcgcgccctgcggggagaggcgttagggggtccgcgcccggcgaggagatgcgcgtaccagccccgcacgccaaggggagaagacacgcgggacggtccgcgcctggcggagagagttcctcacgcccgccccgccgggaaccacaagccagcgcccctaacaagcccctgcccagagcagggctgccgcgtaccctcacagacagaaagagcgaccacgcagccaccgcccagccccagccgctctggagtccttgaccccaccctcactaggccttggctccgcgaccggtgggcgggaacggaggaaacagacccgagaggccgcgagaggacggaactcacttcccgccgccgtagcgtcctcgtcagctcgccctccgactctccgcatgggcgcgcagagttcccggatgcgatattccggtgacaccggacgctgggggcggggcctagtgcgacgagggcggggccggggccggcccggggcggggccgtggccgcagctgcctggcagccagaacctgggagcgctcgcagtgctgcctttcggggttctttgtccttcgcttctgctggtaggtgaggtttaacagacggaaagacgccgggagcgcacgtgggctgccttgagccgctgcggacgagcaccttgtctctcaggttgaccagccgtatatccgcttgcgagcctgcaccaccctgggcgcgcgtggtctcggcagaatctcgttcacacgggtcccactcgtaggctgctgtgtctccttcctctcacggcgtcggggactggggcctggagtcactcctctacaggggtgtggaacgcgccaatggacgctgacaccttcatgcggtcgtttaacgctccgtgcacaataaccattttactcagttgtgtgatgctccatcgaaaataacccatttacacggttgtataagaccccacgacacgataacccctctacgcagttatgtaagactccatggcacaataaccccttcatgcggttgtgtaactctccatggcacaaaaacccattgccatgcataaggttccgtgccaaaataaccactttacgccattgcataacactctatggcacaataaccactttacaaggctgtgtaatactctacgccacaataaccctttcatgtggttgtgtaatcttccatggtgcaataaccacttcacttggttgtgtaatcctccagggcacaataatcattttatgtgatcgtataaaatgctccactgtgaatacaccatttgctcattttccttcctgtcagtggatatttgggctgtttccagttgggagttactacaaaggaacctgctgtgaacattgtgtgtgcatcttttgataagcaggtttgtatttctgttgggtgaatgcctaggactgcagctgtctcttcatgggtgcacctgttcaggttaggagataacactagtttacagtgccccctgcagtggtgtataagattcccagttgctccccattcttgtcaacacttggtactatctgttgttttcatttttgccattagtgtgatgtgaagtagcatctcattgtggtttctctgattagtagtaaagttgggcacactttcatgcacttattggccatttggacttttccttgtttatgagggggctggttcaagtcatttgccaacttttctattaagttgcattcttattgagatgctgagttctttatatatttggaggccaatcttttgttggctctacaatggtcttctcccactctgtcacttgccctttcacttgcataatattgctttctgatgaacataagttggttttttggtttttttttttttttttttgagatggagtcttgttctgttgcccaggctggagtgcagtggtacgatcttggctcactgcaacctctgccttccaggttcaagcagttctcctgcctcagacccccaagcaattgggattacaggtgcatgacatcatgcccggttaatttttatatttttagtagagatgggttttgccatgttggtcaggctggtctcaaactcctgacctcaaatgatccatccacctcggcctcccaaagtgctgggattacaggtgtgaggcactgtgcccagcccctttccagttttaaagccaggaacagggagtagattcctcacacttcagctctctactcgctccttcctcagcatctgactccagcccacaatctctgcttttaagggcatgtgtgctagattgggcccatccagataatccaggataccttcttctctatctcatgtcccactcatttcagccaaacttgcaatggcccaggctaccccagaatccatctggaactcacctagtccacatctcatattctctttggtcaggagtttctatcctctgtgattgaattacagtagcctctcctgattggcagtttcacttctccacctttgttacccgaggtcaactgtggtctgaaaatattaaatggaaaatccagaaataaacaattcataagtttcacattgcacactgctctgagtagcatgattaaatcccatgctgtaccacaccatcccgcccaggatgggaaccaggcatttgtctagtgtgtccacactgtataccccctattagttacttttagaagccaccttggttattaaattaaccatcatagtatcacagtacttgtgttcaagtaacctttactttaaaaaatattttataaattaaaccttatcacaggttaagtataagaaaaaacatagtatacagttagccctccatatgcgtgggttccacatttgtagattcaaccaactttggattgaaagtatttgaaaaaacactgcatctgtagtgagcgtgtgcagacttttttcctcatcattacctcctaaacaatacagtataaaaattacaaagtatttacgttgtattagggaacataagtaatctaaacattactatttttttttttttttgagatggagtctcactctgtctcccaggctggagtgcagtggcatgatcttggctcactgcagactccacttcccaggttcaagtgattctcctgccttagcctctctagtagctgggattacaggtgcatgctaccacacccagctaatttttgtatttttagtagagacggggttttgccacgttggccaggctggtcttgaactcctgacctcagctgatctgcccgccttggcctcccaaagtactgggattacgggcttgagccactgtgcccagcctagacattaaagtacactggaagatgtgtgtagattatatgtaaatacacaccatcttatatgagggacttgagcatcatctgatttggtgtctgagggcagttttggaatcaatctcccacagatatagagggacaactgtatatacggtttggtgtcataagaggttttaggcatccaccatggtactggaatgtatccccctggatttggtagggaggactactacatgttcattacagcagtgattcctgctaatttgagaaaagcttatttattattatttcatttcattttgtagagatagggtctctgtctgttgcccaggctggtcccaaactcctggactcaagtgatcctcccacctcagcctcccaaagtcctgggattacaagtgtgagccatagtgcccagcctaagaaaattttttcaataaagatcaagaggaatacaattcacacaaaaccatggggctcataccaatatcatagttgacaccacttcttcagaatgcttactctctggccacaactggtcaggggatgagtccatcccagaatctgaaaggtagaaccaagaggtagagatgctgctgacactaactgcaacacctgcatattttacttgagagctgcagacaccaaagtgaagtgcccagcctgggcattcctgacagtccactagggatttgtgtcttatgatacacacatttctacagagacataaatctgtaacttataactgtacacatcctgggaatgtaagacttttccccaataatggggttcattcttttgaaagtatgaacaagaaatgtatacacttaagccttggcacagctcacacctgggctggataactctgctgtgggggccattatgagccttgaaggatgtttagcagcagccccagcctccacctgccagatgccacccttcatcatgaccacccagatgtctccatatgtcccctgggggcaaaattgcccctggatgagaaccactgctcacagtgaatagatccacatgttcaagtgcgcccacaccatggaatattacacagcactgaggagaaaccacagctgcctgcagcaacatggatgagtctaacctacacaatgttgtgcaacaggcagacatctaattccattcatacaaacacatggtgaggcaggctttattccagaagctactacagaggggcttgggaggccagactcaactccagcttggacaagaacaagtgagggcttaaagccgagaagcagcagggtgtctggaggatgaaaaattactaagtgcaaacctcagagataaggggtgaattcttgccagaccaactcaagagaagttttcctaaaggcaggcccagggaagaagacattgaaggtgggggacaaggaatttgatcagatatcaaagtggagtggggagtgctacacacttttaaacaaccaggtctcatgaaaactcactcactatcatgaaaacagcaaaaggggaaatccacccccatgatacaatcacctcccaccaggtctgtcccccaacactgggaattacaatttgacatgagattttggcagaaacacagagctaacccatatcattctatccctgtcccacccctaaatctcatattcttctcatactgcaaaatgcaatcatgccttcccaacagtcccccaaagtcttaactcattccagcattaactcaaaagtgcaagtccaaagactcatctgagacaaggcaagtccctttcacctatgagcccataaaatcaaaagcaagtgagttacttccaaggtacaatggagggtacaggcattgggtaaattcccctattccaaaagggagaacttggtcaaaacaaaggggctacaggtcccatgcaagtctgaataccagcagggcagtcattaaatgtttaagctccaaaataatcttctttgactccatttctcacatccaggtcacactgatgcaagggctgggctcccaaggccttgggcactccactcctgtggcaatgcagggtacagcccctgtggctgctttcacaggctggtattgagtgcttgtggcttttccaggcacacggtgcaagctaacggtggacctaccattctggactctggaggatgatgaccctcttctcacagctccactaggcagtgcctgagtggggactctgtgtgggggttccaaccccacatttcccccatccccctgccttagcagaggttctccacgagggctccacccatgcagcagacttctgcctggacgtccaggtgttcccatacatcctctgaaatctaggcagaggctcccaaacttcaactctcgccttctgtgcacccacaggtccaataccacatgtaagctgccaaggcttgggacttgcaccctctgaagcaatagaccaagctgtacattggcctcctttagccacagttagaactgacgcagctgggatgcaggatgccaagtcttgaggatgcacagagcactggggccctggaccctggcccacaaaaccatttttctctcctaggcctccaggcttgtgatgggaggggcggctgagaaggtctctgaaatgccctgcaggcattttgctcattatcttgcctattaactttcagctcttctttacttatgtacatttctgcagcctttgattcctgccagaaaatgggcagcaaattttcaaaactttcatgctttgcttccagtttaaatgtaagttatagttttaggtcatttctttgattatgcaattgagtgcagactttaagaagcagccaggcgacctctccaacactgctgcttagaaatttattctgccagatactctaaataatctttctcaagctcaagttgtgtctgtcacagatctctagagcaggagcacaatgctgccagtctttttgctaaagcacagcgagagtgacctttattccagttaccagtaagttcctcatctctatctgagaccaccacagcccagacttcactgtccatattattagcattttggtcacaaccatttaagtctctaggaagttccacactttccctcaacttcctgtcttcttcggatcccttcaaactgttccaacatctgcacattacccagttccaaagtagcttcaggaatctttatagcagtgccccactcctgttaccaactttctatactagtccattctcacactgctgtgaggaactacctaagattcggtaatttatgaagaaaagaggtttaattgacttacgattccacaggctgtacatgaagcatggctgggaggcctcaggaaacttacagtcatggcagaaggtgaagaagtaagcatgtcttaccatggcagagcaggaaagagggtgaatgaagaaggaagtgctacacacttttaaacaagcaggtctcatgtgaactatcatgagaacagcaaggaggaaatctgcccccatgatccattcatctcccaccaggtccctcccctaacaagagaattacaatttgacatgagacttgggtggggacacagagccaaaccatatcagattctgttttgagacagggtcttgccccattatccagcccacagtgcagtggtgtgatcacggctcactgtagcctcaaactcccaggcttaagagattcttctgccttcttcctgactctccctcctgataagctggaactaaaggcacatgccatcacacctggctaatttttacattactatttgcagagatgggggtcttgctatgttgcccaggctggtcttaaatgcctaggctcaagcaatcctcctgcctcagcctcctgaagtggtgaaattacaggtgtgagctactatgcacatccaaacatcttgctcaaactggatcctatagggaaagggagaagcccaaggtcagagggctcaggggatcctgatttaagttgggtcaaggagagtctgcagtgcacttttctgtatgtgagctatactcaaacgcaactctctggagaagacaagtcagcctggtcccctttcatccatcaccacaccctgggacacagcaccatcccatcctgactccagagggttcaacaagggtccccgctagtcctccatgcccctgcacctctcaccatgagatcaccatatcccaatgtgtgtgggggagctttacttctctaaatgctctttcagggccactcttcccttcttcactccgtgcctccattacctatctactcattcctctctcaggactggctgcccacccttcccatgacacagctatcagaggcataccaaggttggctgcctcatgggagacagcaagtgccatggaggccacagctgatgccagacaaaagagaacacacacagagaaggaggcatggctgcttgaagctccccacgagctggcctgagggtccggacctcagaataccagcaccatggagacaccaggtcacacacacatgaaccttgatccagctaatacaatgggcctggctgaccccagtcctggactgactcatcactaatcttcactatcgtcacacctgtcccttctcccaggagaggaaattgtctagaggcaaaatcccaaggggatccactcatggggcttcaaggctgtgtcatccaccttgactggctttcactcggccagtactgcactgcctcggaagggccactccaaagtcatcccaaattttctacaggcttcctgttctccattctctgggactcactctctcttctacactgacaaccccttataacccaagtcccaaagaaggaagttattctcatgccctgggctttgggatgctgattccagagacgctactgcccaatgcccctccatccacacttacagcttccctgttgccctgatccagtccctactactaaaggtccaaagaaaccccaaattaacctccttttggcttcactttttaatttattaccaaattattatgccaacaagtatctgtaacagagaaaaaaatatgatacaaaattccagtccccaaagaaaaccacattttatttctccatcatccactttcaacatacatccatatgtgcacatatttttacatggctggaataatagtaaatcttctatttgatgcccctttttgccatattataaacattttcaacatggcaataaaacctttataatggttcacagtggctgaattagaagcatcctaaatgaacaaccatggaggtagtggtggggtgataacataaacataacaactcagtatttttgcttcaacaactaaagcaacaaaccacatctgttagaagcagccctttccatcttagcacaagcttgtttcagtctttttttttgaaatggagtctcgctctgtcacccaggctggagtgcagtggtgcgatcttagctcactgcaacctccacctcccaggttcaagcaattctcctgcctcagcttcccaagtagctgggattacaggcacacactactatgcccagataatttcctgtatttttggtagagatggggtttcaccatgctggccaggctggtcttgaactcctaaccttgtgatctggccgcctcggcctcccaaagtgctaggattacaggcgtgagccaccacatctggcctgcttgtttcagtcttaagaggaacgacttcattgttcattcacaggtaatttattcacctagtttgccctcctgcaacgagtcctcagcattattgcaggagtataatgcagacatacattcaaacaggaaaatctcacacattctgtggtgtgtgcagtacagcactgtgtggactctctcattgtacacctttgttgttacagaaaacacagtaagagcccctgccaaagcctctctttctgattacacttaaaaaaggttgattcaggccaggcagtgtctcatgcctgtaatcccaacactttgggaggctgaggtgggcggatcatgaggtcaggagttcaagaccagcctggccaacacagtgaaaccctgtctctactaaaaatagaaaaaattagccaggcatggtggcaggcacctgtaatcctagctactttggaggctgaggcaggagaactgcttgaacctgggaggcagaggttgctgtgagtggagatcatgccactgcacagtgagactctgtccgaaaaaaaaaaaaaagttgattcagtgtttgcttacgtacaaggtggaaactccctactacagggctcttcattccaatcatgttctgaatgcattcacaggttctctctgtggtgtcacccccatgtttgcacatttcattccagtgtgtgtgttgtcatgtctggtacagactgaatcatccccaaagacttttctgccctcatcctaagttgtctctggagttccccaatgagcagacttaacagtgtggctcagcaatgtctcacattcatcaattcactggatagcttaaaggattcttttctactgaccagagaggagtcagatctaagacacgcctcctaaacacaggagtgagagtgaactggaagactcatgtggcccccaaccattatgtttccatgggttgctctcccaggtgtgctctttgatgtcgaacaagggatgagctcttttggaacatttttccacactgaggacaccggctgggaccctccctgctatggagtctctgatgtactgccaggtgagagttctgcttgaaggacttcccacattctggacactgatatggggtctccttagtgtgaattctctggtgcttggtcagacaggagctgtccctgaaggctttgccacactgattacactcatagggcttctcaccagtatgagtcctctggtgcctaatgaggccagcgatattcctgaaaagtttctgacactggttgcagccatagggcttctcgccagtatgaatcctctgatgcctgatgaggtacgcactctcgatgaaagtcttgccacattctttacattcatagggtttctccccagaatggatcttttgatgcacaatgaggtgagagtttctgttgaaggatttcccgcactctgcacactcaaagggcttttctccagtgtgagtcctctcatgctgggtgaggtacgagccgtcccggaaagcctttccacatttgctacactcatagggcttctcaccggtgtggattctgagatgcactgtaaggtgggagatgtcagtgaagggtttcccacattcgttacatctatatggtttttcccctgtatgagttctttggtgcaaaattaaggatgaatttcggttgaaggtttttccacactctaggcattcataaggtttctcgcctgtgtgaattctctggtgctgtgtcagagctgagccatcactgaaagctttcccacatttactgcattcatagggcttctctcctgtgtggattctttgatgcacaatcaggttgtagttcttggagaaggactttccacactcattacaagtataaggcttctctccggtgtgagttcggtgatgcaaaacaagagaagagttccgtttgaagcatttgccacattcagtacatctatattgtttctctccagggagatttctctggttttcattaagcgatgagctcagagtaaagatgttctcaaaattcttaccttcatacgatttcttgcctcttttcattattttctgatgaccaagagaggtaaaatgattaaaagacttaacactttcagggtatttgtagggcttctctctcactggatttcttccatgaataacttccatggaatggttgaagccttttccacaggcatcactgtcaccagttctcttatctgcataacttttaggatagctgggtaaggcggggtcacaatccagaccactaacatttgagtcaggtgcatggaaaccatttgttgccagaactctctgagacggtggaaggtctgagcttgcaatcaaatgctccccaaaaccaggatattcacaaattgcttcctgagtccctggtttctccagagttaaagctgattgcctcaagtgtccctcctggttctcacagtcccaaccatcacctaaactggacaagcagggaacttcccttgtgaatctttccacttctacatcacagggtacttctctctcaggaaaattccgagtcgtcattttcaatctcatatcccaaactgcaaaaagaagaaaaatgcagacttaggtatatgaagctttatctgtaagagaaacagacaatgatgatgggctaggtgtaaagatgtgtatttttttacttgttttctcttttaaattcaaatttatacaaggaagaggtaaaatcgtagccaaggaatggaaccaagaacagattcaaaaagagccatgtagcattttcatcttcctagagagcaggcaggaggaatggacctcgggataaatcatcaccaaaaggattagtttgagatgtgagagaccagaggccaagcatccctgctccccctagaattccatcccagccactgcattcttgtccctgtcacacactgcccatcagtacacatttccaaagctctgacttcacaatgagcttacaacagcactgaaggaacagttctcaccccagctctgtcatcaaagttctgcattcatggataggacaaagcacaggcttggtgacctaaaagttctgggtctaagtcttagaactgtcaatgacctggcggggcacagtggttcactcctgtaatcccagcactttgggaagtggaggcaggtggatcatttgaagtcaggagttcaagaccagcctgaccaacatggtgaaacaccgtctctactaaaaatacaaaaaaaatcagccaggcgtggtggcacatgcctgtagtcccagctactctggaggctgaggcaggagaatcacttcaacctggtaggcagaggttgcagtgagctgagatcacaccactgcactccagcctacgcggcagagtgagactccatctcaaaaaacaaaacaaaacaaaaactgtcaaagactgccctgcatggttgttataaaaactggatcatgtcggccaggcgcggtggtcacgcctgtaatcccagcactttgggaggccgaggtgggcagatcacaaggtcaggagattgagaccatcctggctaacgtggtgaaaccccgtctctactaaaaaaatacaaacaattagccaggcgtggtggcgggcgcctgtagtcccagctactcgggaggctgaggcaggagaatggcgcgaacccgggaggcggagcttgcagtgagccaagatcgtgccactgcactccagcctgggccacagagcaagactccgtctcaaaaaaaaaaaaaaaaaaaaactggatcatgtacaaagcagtctccaaggctaggggatgaagggcattctgtaaatggttgcatgtgtcttcatgcatatcaatcttcctgtcaccatccttgtccattcagacttcacaatattaagacaactggttgtccattcattcgttcattcatttggtgggatcgggtctcgctctgtcattcaggctgaagtgcagtggtgtgatcttggttcactgaagcctcaatctcaaaaacttcaagcaattatcccacctcagcctcccaaaatgctgcaaatacagggatgagccattgtgcccagccttctttctattttttaaggtaaaatgaaaatagacccttgcctcagaatacatacatacatatatgtctacattctaggcaatttaaatatatatacatgtatatgtgtatatgtgtgtgtgtgtgtgtgtgtgcgcgtgtatttacatttcagaaggatacaggctgcaacataaagtcaaagtttaaataatgtagtatgccttcataagtgtggcagactttgatcaacaaaacttaaccaaaaaaccatatggccaagcattgggggtcatgcctgtaatcccagcactctgggaggctgaagtgggagttatcacttgagcccacacagaaggctgaggctgcagtgagctgtaattgtgccactgcattccagattgggcaaaagagaccatgtcttaaaaacaaaaaacaaaaaccaaaaaataaaaaacagacaaggattaagaagtctgatatcagcattcaaattttccatccaataaaagacacaataagagacaaaatgcaagtggcagatagggagaaaataggacttaaaagcacaaagaattattgcccaagagctatagaggattcttacagagagaaaataagatttaaaagcacaaagaattactgcccaagaactacagaggattcttacagaacagcacataaaaagaaaaaaaatgggcaaagtaatcaaagagcacttcgtgaagggaaaatagaaatgtcctgaaaacattggctgggagcagtgggtcacgcctgtaatcccagcactttgggaggctgaggcaggtggaccacaaggtcaggagatcgagaccatcctggctgacacggtgaaaccccgtctctattaaaaatacaaaaaattagccaggcgtggtggcgggcgcctgtagtcccagctacttgggaggctgaggcaggagaatggcatgaacccgggaggcagagcttgcagtgagccgcgatagcgccactgcactccagcctgggcaacagggcgagactctgcctcaaaaaaaaaaaaaaaagaaagaaaaaaaagaaatgtcctgaaaacatcaatatttattttctcattctatcattcaggcaattccaaactgcgactttaagaacacaaaatatacacatttcacgtgagtaaaaataaaatgaagtacaataatataaagctttggtaggtcacaagggaagagggcttggaaagtggtcagcgtgcttggcagggtaccttagtggcagctgtgaaaacataaactgggggcaggcgcggtggctcacgcctataattccagcagtttgggaggctgaggtgggtggatcacctgagctcaggagttcgagaccagcctgactaacatggtgaaaccccacctccactaaaaatacaaaaattaagccaggcacagtggctcacgcctgtaatcccagcactttgggaggctgaggcaggtggatcacctaaggtcaggagttcaagaccagcctgggcaactatgtctctactaaaaatacaaaaattagctggacgcggtggcgcatgcatgtaatcccagctactcgggaggctgaggtaggagaatcgcttgagcctaggaggcagaggttgcagtgagacaagattataccattgcactccagcctgggggacagagcgagactccgtctgaaaaaaaaaaaaaaaaaagaaaacataaattaggtatattctaccacccagcagttccactggtaggtatctcagagtcagaaagctggataaacgaacatcaatccatacctacgtagatagatggtctttttcttttttctttttttttgagacagagtcttgcactgtcacccaggctggagtgcagtggtgcgatctcagctcacagcaagctccgcctcccaggttcacgccattctcctgcctcagcctccccagtagctgggactacaggtgtctgccaccacgcccagctaattttttgtacttttagtagagacagggtttcactatgttagccaggatggtctcgagctcctgacctcgtgatccgcccgcctcagcctcccagagtgctgggattacaggcgtgagccaccgcgcctggccaatagatggtcttaaaggccagcagagagaagagaaaccaccagtgaatgacgaaaattattacaatagatcacttaatagaaaaactggaaacccaaaggtaacggaaggctactttcaaagcactgaaggaaaaaatctatcagtcacactattgttcaagagcaaaggtgagataaagactgtttcagaggctggatgtggtggctcatacctgtactctcaacactttggtaggccaaggtggatgggtcacttgagcccaagagtctgagaccagtctgggcaacatggtgaaaccccgtccctacaaaagatacaaaaattagcagggtgtggtggcatgcgcctgttagtcccaactacttgggaagctgaagtaggagaattgcttgagctccaggggttgaggctgcggtgagctatgattcactccagcctggacaacagtgagactgtctcaaaaaaaaaaaaaattcagaaaagcaaaagcagagttcatttccaaggatactagccagaggaattagaaaatgttgttcttcaaaaaaaccccaagaacgaaggaaggaaaaacaaaggaattgatgaatatgatgaatgtgggctaggtgtggtgactcacacctgtaatcccagcactttgggaggtcgaggtggggggatcacttgagcccaggcatttatgactagtctgggcaacacagtgagatgtcatctcttaaaaaaaaaaaactgatgaatgtatatttaaatcaaatccaatgctgaccacatgaaatgcagaaatcacgacttggaattaatgggatagactaatatactagacaacagtggccaatgaggtgggaatggggcaacagaatcaagtgttctgaagtcctcaagtttctcatgattcatgttagacctgctcaagtcagaattaaaagaataaatgtagtataaaacatctaagcccacagagcagtagtttttaaccagggatgtttctacttccagaagatacttggcaatatctggagatgattttggttgtcagtctgactagggggcagatgttcctaggagccacggatgctgctaaatatcctataatgcacaggatggacttccacaacacaaaatgatccagccccaaatgtccatagtactgaagttgaaaaacattgtagagggaggtcagaattaaaaacaaaaacaaacagacaaaaaacccgatcaatccagaaagctggtaaggggtaaaaaacagcacaaaaaggacagactaaatacaaagtgtaaagtaaggtatcaacaattacaataaatataaatggccttgatgggtcagataaagactgcattagactgtattaaaaaacatgtttgtaacaggtattcctaaagcaaaaggacataaaagccaaaagtgaaaggatgggacaggtgaatgccaaacaaagaagggttttgtggctctttacaaaccaaagaaaaatttcaagtgaggatcacagggcaatgtaacagtaacaacatgcctcaaaacacagagcaggccgggcgcggtggctcatgcctgtaatcccagcactttggtaggctgaggcaggcggatcacttgaggtcaggagttcaagaccagcctggccaacatggtaaaaccatgtctctacaaaaacacaaaaattagcgaggcatggtggcacatgcctgtaatcccagctactccaggaggctgaagcagaagaattgcttgaatctgggagacagaggttgcagtgagccaagattgacccactgaactccagcctgggcaacagagcaaaactccatctcaaaaaacaaacaaacaaacaatcaacaacaaaaaaacacagagcaaagccagctaggtttgtaggaagaaaacagcaaatctaaggatagtgggaaattttatttatctgttttttgaggtttttttttctgatcaagtagctcagattatatttaaattttaaaaaatgttttaatgtaattgtttaatttttataatgggggtctcagtatgttgcccaggctggcctcaaactccagagcacaagcgatcctcctgcctcagcttcatgagtagctgggactataggcacatgccactgcaaccagccatagtgggaggttttattttatctatttaatttttttttttgagacggagtctcactcttgtcgccaaggctagagtgcagtggcacgatctcggctcattgcaacctctacctcccgggttcaagcagttctcctgcctcagcctcccgagatgggattacaggtgcccaccactacgccagctaatttttgtatttttagtagagacaggtttcaccatgttgaccaggctggtctcgcactcctggcctcaggtgatctgcctgcttcggccccacaaagtgctgggattataggcatgagccactgcacccggcaggtgggaggttttaatgaacctcttttagaaatgaaaacgcagaagaatggaaaagagttatgcaggacagaatgtagttacccaatctgatcacacagctggatgaaaatctacgtacaaattaaaataaaatgctttctttctaagcacaagtggaatatttgctaacactgactaggtcaaagaaaaagttcaacaaagcccagactacagcctcttgacttcgaggcagcaagttaaaagccagtaacagaaagaaaaccaaatataataaaacagcgagtaaagcaaactcctatttatttggaaaaataaaaacttgtttctcagtaattgacagatcaaagagaaaacctgatagaaattacaaaacacctagaacaggccacgcacggtggctcatgccttgtaatcccagcactttagggggcagaggcaggtggatcacgaggtcaggagttcaagaccagcctggccaatatagtgaaaccccatctctactaaaaatacaaaaattagccaggcatggtggcgcatgcctgtactcccagctactcgggaggctgaggcaggagaatcgcttgaacctgggaggcagaggttgcagtcagccgagatcatgccactgactccagtctgggtgacagagcgagactccatctcaaaaaaaaaaaagaaaaaaaagaaaaggaaaacacctacaactacacaatgatgaaaacagcacatctcaaaacatgtggcaaatgagaatgcagaatgcagctaatagttcctagattgaaaatgctggtctttaatgcctatattttaaaaagaaggctaggtcaggcatggtggctcacacctgtaatcccagaacttttagaggctgaggcagggatatcacttgaagccaggagtttgaaaccagcctgattatcatagtaagactgtgtctctatgaaagaaaaaaaaagttagctgggtgtggtggtgtaactcgcctttagtcccaggtagttgggaagctgaggcaggaatatcccttgagcccagaagttcaggagttcaaggctgcagtgagtcatgatcgcatcactgcactccagcctgggtgacagagtaagactgtctccaaaaaaaaaaaaaaaaaaaaaaaagggactaaagatgaagttactgtgggtcctgaagctacagatggcagcaagtcaacagccatggtggtctccaaggctgcccacagattttctttaggccatcgctgatgggttctatgtatcattgaaatgaatggcaataacacattctgggatgtgggtaacgcatggtgccctcagaatggtcttgttggcttcactgtatgactgatgatcctccaacaataaacaacctactgcttgtaaactcattggacaagccataaactcaaagtgatatgtaccttattccaccactagaaagaagattcaggagtaagtcccaccttcaacaccttgtaagtacagataaaaaaaaaaaaaaaacagtttaaacatgtaaaaaatgggactttttatgtagttgtacttttagggctcaccattaacttgattataattgactaaaagaaaagaagaccgaagactagtgatctcactgttcaatttacaacttatgggaaagaactatggactaaaccaatgggaggtagaaggaaagtgttaataaaaatcacagcagaggctgggcacggcggctcacacctataatcccagcactttgggaggccgaggcaggtggatcacctgaggtcaggcattcgagaccagcctgatcaacaaggtgacacctcgtctctactaaaagtataaaaattagccaggcatggtggcaggtgcctgtagtcctagctactcgggaggctgagacaggagaatcacttgaacccaggaagcggaggttgcagtgagccgagatcgtgccactgcactctagcctgggtgacagagcaagactgcctcaggggaaaaaaaaaatcgcagcagaaattatggaaattaaaaacaagaaaccagttgagaaaatgaagaaaaccaagtctgtcatttgaaaagacaaatgaaagagaccattaaaaaacagcaagaaaaaggccagacatggtggctcatacctgtaatcccaacactttgggaggctaaggcaggtggactgcttgaggtcaggagtttgagaccaccctgggcaacacagtgagaccccatctctacaaaaaatacaaaaaaaaaaaaaaaaaaaaaaagccaggcgtactggtatgcacctgtggtcccagctacttgggaagctgaggtgggacaatcgcttgagcctgggggtcagaggttgcagtgaacggagagagtgccacttcactccagcctagctgacagagcaagaccctgtctcaataaataaataaaattttttaaaaagcaaaaatgaacacataagtgatattaattgtcagacaggggtttaactaacagtgtaaggttaacaaaatggcaaagttggatttatcctaggaatgtaaggactaggaaacattggaacatctattaacacaattccccatattatcagattaaagtagaagacagcgcccttacaccttatcccaatacattcagaaagtaatatgaaaaaaatctcaccaagactcatgatcaaaatactctcagattcaagtaatagatcctttatctcaaaaattcaaaaagtactttaaggaaacctcagactcctaaggaaaattcttaataattagggtcataggaaattaatgtgaacatcacaccttaaacatcagaaaaaaggaaacatcagaatcatttactttcaagtccaggccaaggccttagacacttgctatgtacacagcattcagcagtgatgtggaggggccagccagtcaggaggaccatgctcccagctgtcacccctggatgctacaaggacccctcccgtggaaagggctcctgaagctgccctgccgcatgacatgtttcctgttctgaatcttctggatagactggggcctggcatggtctgtggccatcctgtgaaaacaagggacttgaaagcacctccccgcacgtttgtgaagggaagatgcacacgtacagttaaaagaaataaaataggctgggtgcggtggctcacacctgtaatcccagcactttgggaggctgaggcaggctgatcacatgaggccaggagtttgagaacagcctggcagacacggccaaaccccatctccagtaaatatacaaaaattagctaggcatggtggtgcacatctgtaatcccagctactcgggaggctgaggcacaagaatcgcttaaacctaggaggcggaggagacagagcaagactgtctcaaaatttaaaaaaaagaaaaaagaaaaaaagaaaataaaagatgagataaatcagacatatacagggtgatatcatttatggaatttcttcagacacacaaaatattctcttagaaataaaaatataacgatgccttggcaagacaccaaccaaggctgtgattacgtctctcttgggggtagggaggctaactcgccttgaggaacaaaaggaatgtccatttcatccataacagatacttcctttgttgaaataaaacttaaacaccaccaagaaagtgaaaacacaacccaccaaatgggagaaaatatttatattatgtgtatctagaatatcgaaaactcttacatttcaataataaaaagacaaaaacccaatttttagaaatgggcgaaggatcttgtcttagtctgggctgctacaacaaatagactgggtggcttaaacaacagaaatctatttctcacagttctggaggctaggaaatccaaaatcagtgtgtcagcatgattggttctggtgagggtcctcttcctggtttgcagatggccaccttctcagtgtgccttcacagggtacagcaggaagcaggagctcctgagagctctcctgtctcctcttataagagcactgatttcattcaaaaaggttctaccctcgtgacctaattacctcccacaggcctcatctccaaataccatcacagtggggataaggcatcaacatacaaattttgaggggacactacattcaccccataggagttctgaatagatatttccccaaagaagtcatacaaatggccaatgagcacatgaaatgatgatcaatatcattaggtattcgggaaatgctgatcaaaaccacagtgagatgccactttacactcactagtatgttcaatatttaaaaacaaacaaaaacaataacaagtattggcaaggatatggaaaaactggaaacttttcactgccggtgcaaatataaaacagtgtagctaatttggaaaccagtctgatgattctcaaaaaggaaaatatggagctgtcatatgatccagctattccactgctacggtttggatatggtttgtccacaccaaatctcatgctgaaatttaatccctactgtggtggtgctggggcatgcagcctaccaggaggggtttgggtcatggaggtggaacccgcatgaatggcttggtgctgttctcacagtagtgagttcttgctctcatgagactggatcggttctgggggaaatgaattagtgcccccagaattgtattgattctttacatagacttagggctttagaatttaaagaattatatggatatttaatattaccagtaaatttagagtacactgcaaaacagattataaaccgtgcacattacataaaaatttactcaaaatggatcagcctaaacataaaagctacaactataaaactctttcttttttttttttttttgagacagagtcttgctcttttgctaaggctggtgtgcagtggcgtgatctcggctcactgcaagctccgtctcccgggttcacgccattctcctgcctcagcctcccgagtagctgggactacaggtgcccgccaccacacccagctgattttttgtacattttttagtagagatggggtttcaccatgttggccaggatggtctcgatctcctgacctcgtgatccgcccaccccggcctcccaaagcgctgggattacaggcgtgaccaccgcgcccagccctttttttctttcttaagagacagggtctcactctcttgtccagcctagactgcaaggtgcaatcaaggctcaacacagcctcaatctcctgggctcaagtgatcctcccacctcagcttcctgagtagctgggaccacagttgcacaccatcacacataattttttttttttttttgagttagaatctcactctgtctcaggctggagtacagtggcatgatctcagctcactgcaacctccacctcctgtgctcaagcgattctcttgccttggcctcttaagtggcacatgcccccatgcctggctaatttttctatttttagtagacagggtttcaccatgttggccaggctggtcctaaactcctaacctcaagggatctgcatgtctcagcctcgcaaagtgctgggattacagacgtgagccaccacacccagcctaaatttttcttttttttttggtagagatgaggtctcactatatgggccaggctggtcttgaactcctgggctcaagcaatcctcccacctcagccttccaaagtgctgggattacagttgtgagccaccacgcctggcttaacactctttttttttttctgagacagagtctcgctgtgttgcccagactgaagtgcagtggagcgatctcagctcactgcaacctcctcctcccgggttcaagtgattctcctgactcagtctcccgagtacctgggattacaggcatgtgccaccatgcctaatttttgtattttcagtagagacggggtttctccatgttggtgaggctagtcttgaactcctgacctaaggtgatcagcctgccttggcctcccaaagtgctgcgattacaggcataagccactgtgcccggcctggcctaatgctcttggccaggtgcagtggttcatgcctgtaatcccagcactttgggtggctgaggcaggtggatcatttgagctcaggaattcaagaccagcctgggtaacacggtgaaaccccatctctactaaaaatacaaaaaattagccaggcatggtggcatgcacctgtagtcccagctactcggaagactgaggcaggagaatcgcttgaacccaagaggcggaggttgcagtgagccgagatcatgccattgcactccagcctgggcaacaagagcgaacctccatctcaaaaaaaaaaaaaacaaattagccgggtatggtggccctcgcctgtaatcccagctactagggaggctgaggcaggagaattgcttgaacctgggaagcagtttgcagtgagccctgatcgtgccactgtactccagctcgggtgacagagcaagactacatctcaaaaataaaataaaataaaaaaagacccatgctataacatgaaacattttcctaagtctaacaagccacatacaaaagaccacatactgcaggctatttatatgaaatgtccataacaggcaaatctataagacagaaagtagattagagattacctagggctgggaaagatgggggagtgactgctaatggtatgggttttctttttcaggggtgatgaaaacattcgaagattgactgtggcaatggatatacaagctagttaatataataaaaaacaatgaattgtacacttaaaagggtaaattgtatgctatgtgaattatatctcaataaagctgtttaaaagagtaagtatgtgtcgagtctgtaagggtcagaaccactagtctagaccccatctgccacatttctggtattttaggactttataaaggaaataacagtccttgcagggatgtgctgagctcatgtagacttccattccctggtactcacctctgaaaggcagagggatccattcaggccaggtgtgtggatacttgacatcgatggttgctggacattagccatttatgcccatccacacggctccagccatctctgtgggacacccataataatgtttactttacttgttcacaactcattaacaaaaataaatcatttaccaactttaatcccatcctgacaaagtcagccatgtgattacaagtgtgataaagagtctgactccattttggatggttgctgacagctttcaagccccaacccctttctccttctccctctcatctgggcaagccaacaagaaagtctgggagtttcctccttggtgccagcaggaagttcaaactatgcaagccccaaccccaaccccattacctaatcacagtgaaagcccagccacagccgggtgcactggataacacctgtaataccagcactttgggaggttgaggcaggaggatcacttgagcctaggagttcaaggccagcttagacaatgtagtgaaatgcctttagccaggcgtgatggtgcatacctgaagtcccagctacttggtagcccaggagctcaaggctgcagtgagctgtgatcgtgccactgcactccagcctgggtgagacagcaagaccctatctcaaaaaaaagaaaacaaaaattaacaaaaattatatagtatctttgtggtgaaaacttgaaaaagtttactcaagacctgagagggcatttgagtaagagaggagctagaccaggtacacagatgaaagggctgggtactgaaaccaggacaactctcactagacctgtaaaagcaatgccttccaagcaaatctctggaataattttactgatgcgtgacaaaattcacactgaagaagacagcttcctgaaatatccatgacaactccttaaaaaacaaaaagaagagaggaaaaagagctaggagtagttgttttgccaaagtcaaggctcctccttaaagttccagtaagcaagcaacccagtgaaggtacaggaaggacagagccccaaacagacttggaggcatttaataatttaaaaggtgataaaggtggcctcacacattagcaaaagtaagtatatctcgtgctgtcttttcagatggaaaaataattacaattccaaattcactcacgctcacacacaggcttataagacctaaatagtatgtgagaaaaaatttttttgaatgattagaaataatagaactaggctgggcgcagtggctcacacttataatcccaggactttgggaggccgaggcaagtggatcacccgaggtcaggagttcgagaccagcctggccaacatagtgaaaccctgtctctactagaaatacaaaaattagccaggcgtggtggcaggcgcccgtaatctcagctactcgggaggctgagggagaagaattgctggaacccgggaggcagaggttgcagtgagccgagattgcaccatttcactccagcccgggcaacaacagcgagactcagtctcaaaaaataaataaataaataaatatagaactacaagaatatctttgagttatcagagtagaaaaaaattgtgggtttttttgttgttgttattttttatttttttatttttcagatggagtcttgctctgttgcccaggctggagtgcagtggcgtgatctcaactcactgcaacctccgcctcctgggttcaagcaattctcttgcctcagcctcctgagtagccaggactacaggtacctgccaccacacgcagctaattttacatctatatctatctatctatctatctatctatctatatatatatatatattttttttttgagacggagtctcgctctgtagctgggctggagtgcagtggcgcgatctcggctcactgcaacctccgcttcctgggttcaagtgactctcgtgcctcagcctcccgagtagttgggattacaggcacgcgtcaccacactcggctaattgtttatatttttaatagagatggggtttcaccaagtcggccaggctgatcttgaactcctgacctcaggtgatctgcctgcctcgacctcccaaaatgctaggattacaggcatgagccatggcgcccagccaagaatttttttttttttttttttttttaaagagacagagtcttgctttgatgctcaggcttgaatgcagtagtatgatcatggctcactgtaatcttgaatgcctgggctcaggagccatgaccataggagtatgccatcacacctggataattttttttctttttttttttttttttgatacagagttttgatctgtcacccaggctggagtgcagtggtgcgatctctgctcactgcaagctctgcctcccgggttcacgccattctcctgcctcagcctcccgagtagctgggacttcaggtgcctgccaccatgcctggctaattttttgtatttttagtacagacggggtttcaccatgttagccaagatggtctcgatctcctgacctcgtgacccgcccgcctcggcctcccaaagtgctggaattacaggcgtgagccaccgcgcctggccattttttttttttaaatgttttgtagagattgggtctcactgtgttgcccaggctggtttcaaactcctgagctcaagtgatcctccagcctcagattcccaaagtgctgggattaaggcgtgagccaccactacatcaagccaaaaaaaatttcttttttcttccttttttttttttttttttttttttggagacagtgcctcactctgtcacccaggctggagtgtagtggcatgatctcagctcactgcaacctccgcctcctgggtttaagtgattctcctgcctcagctgcctgagtagcttggattacatgtgcccaccaccatacccagctaatttttatatttttagtagagatggggtttcaccatgtcggccaggctggtgttgaactcctgacctcaagtgatctacccgcctcagcttcccaaggtgctgggattataggcgcgagccactgcgccaagccaaagaatttctcaactcacaaaaggcacaaaacataaagaaaaagatttgaaacatcttactatatcaaaatgagtaatacaccatgaacataagattaaaagaacattcaaagtaccatctctagaatggcttatcaattacagaggggaaaaagcggaggatcctggcagagagcactttaaccacatgacaaaaacctgatcaccaccagcctcacatgcttcctgacacgacacaccaagaagaacatgatgtcacttagacaatgccctgccaaagacgagagtctgaatttaatattgggaatgtcaactgaacatcaagtgacaatctacacaaccaccagctgggtcttttaaaaatatatcaatttcatgaaaaaaaaaaaaaaagaaaggagagtgccattcaaggttgaggaagactaaaataacatgacaagtcaatgtaacacaggatcctggattggatcctggatcaaaacaaatacccaaaaaccatacaaactgtatcagctgcatacaaactatatcagacaggaattctgtatcaataataaagtatctggggccaggcgcagtggctcacacctgtaatcccagcactgtaggaggccaaggtgggcagatcacttgaagtcaggagttcaagaccagcctggccaacatggcggaaccccgtctctactaaaaatacaaatattagctgggcatagtggcacacacctgtaattccagctacttgggaggctgaggcaggaaaaccacttgagcctgggaagtagaggttgcagtgagccgagatcgctccactgcactctaccctgggtgacggagtaagattccatctttaaaaaaaaaaagtaggtggtacctggtcaagagaggaaggtagtccctctccctctccccctccccctctccctctccccacggtctccctctccctctctttccacggtctccctctgatgccgagccgaagctggacggtactgctgccatctcggctcactgcaacctccctgcctgattctcccgcctcagcctgccgagtgcctgcaattgcaggcacgcgccgccacgcctgactggttttcgtatttttttggtggagacggggtttcgctgtgttggccaggctggtctccagctcctaaccacgagtgatccgccagcctcggcctcccgaggtgccgggattgcagacggagtctggttcactcagtgctcaatggtgcccaggctggagtgcagtggcgtgatcttggcttgctacaacctccacctcccagccacctgccttggcctcccaaagtgccgagagtgcagcctctgcccggccgccaccctgtctgggaagtgaggagcatctctgcctggccgcccatcatctgggacgtgaggagcccctctgcctggctgcccagtctggaaagtgaggagcgtctctgcccggccgccatcccatctaggaagtgaggagcgtctctgcccggccgcccatcgtctgagatgtggggagcgcctctgccccgccgccccatctgggatgtgaggagcgcctctgcccggccgcgaccccgtctgggaggtgaggagcgtctctgcccagccgccccgtctgagaagtgaggagaccctccgcctggcaaccgccccgtctgagaagtgaggagcccctccgccaggcagccgccccgtctgagaagtgaggagcccctccgcccggcagccaccccgtctgggaagtgaggagcgtctccgcctggcagccaccccgtccaggagggaggtggggggccagccccccgcccggccagccgccccgtccgggaggtgaggggcgcctctgcccagccgcccctactgggaagtgaggagcccctctgcccggccagccgccccgcccgggagggaggtgggggggtcagccccccgcccggccagccgccccgtccgggagggaggtgggggggtcagccctccgcctggccagacgccccgtccaggagggaggtggggggccagccccccgcccggccagccgccctgtctgggagatgaggggcgcctctgcccggctgccccactgggaagtgaggagaccctctgcccggccagccgccccgtccgggagggaggtggggggggtcagcccccccacccggccagccgccccgtccgggaggtgaggggcgcctctgcccagccgcccctactgggaagtgaggagcccctatgcccagccaccaccccgtctgggaggtgtacccaacagctcaatgagaacgggccatgatgacaatggcggttttgtggaatagaaaggggggaaaggtggggaaaagattgagaaatcggatggttgccgtgtctgtgcagaaagtagacatgggagacttttcattttgttctgtactaagaaaaattcttctgccttgggatcctgttgatctgtgaccttacccccaaccctgtgctctctgaaacatgtgctgtgtccactcagggttaaatggattaagggcggtgcaagatgtgctttgttaaacagatgcttgaaggcagcatgctccttaagagtcatcaccactccctaatctcaagtacccagggacacaaacactgcgcggaaggccgcagggtcctctgcctaggaaaaccagagacctttgttcacttatttatctgctgacctcccctccactattgtcctatgaccctgccaaatccccctctgcgagaaacacccaagaatgatcaattaaaaaaaaaaaaaaaaaaagagaggaaggtaaaaaatttccctgtttcttcttttccaggttcagattggcaggaaaaaaaaattacaaataaaaaacaattagttttttgaaaaaaaaaaagtatacttgggtgtgataataacactagttttgtttaaatgttcaaatgttctttttggctgggtgtggtggctcacacctgtaatcccaccactttgggaggccaaggcaggaggactgcttaagaccaggagttcaagaacagtctgggcaacatagtgagatctcatctctataaaaaatacaaaattaaaaaataagaacgttacttttcttatgagatcctggctgaagtatttcagagtgaggtatgatatctataacatacttccagtaactcagccaaaaaaactaagtgtatgtaaatatatgtctgtatcacacctgcctctgcaacacctgctgtgtgtacaagtgtgtgtaaaatataaaaagaaaaccctatgtcagaggcgtttgaaccaaagcaaacctccatcttaaatggggactgggtaaaataaggctgaaacctactgggctgcatttccagacagttaaggcattctaggtcataggataacacaggagatttgcacaagatacaggtcataaagaccttgttgataaaacagcttgcagtaaaggtggctaaaacccaccaaaaccaagatggcaacgagagtgacctctggtcctgctcccactagcaccatgacagtttacaaatgtcatggaaacatcaggaagttaccctatatggcctaaaaatggtaggcatgaataatccaccccttgtttagcatataatcaagaaataaccataaaaatgggcgaccagcagttcttggggctgctctatctatggagtagccatttttttattcctttactttcttaataagcttgctttcactttactctatggactcgccctgaattttctttcccaagatataagaaccctctgttgggttatagctcgggaccccctttctggtaacacctatgcatgtgtctcaggcagggagaagataaagataaagctaatgtggcaaaaagtgttaataattttagaatctggatggttttagaagtgttaaactattcctgcaacttctatgcaaatgcggaacttttcaaaatgaaaagttgggtgaagagagaggtaaacaagcagtagaatggaggaaagtcacttgctgtgggaaaaaagaaaaaacagacaaaaactgggtattcaaaacgtacttcaacaagcccaagttcctatagccaaattttttaacttggcaaaaaataaaggaccttttcaggctgatggtaattttaataaaggtttaggttgcatttgtcaaaattcatcaatggtacagggaatatctgtgcatttcactgaaagtcaattttggctcaaaaaatttaaaaaagcactactgaactctaattcatggtaagcatagtgaggtgtttgagggagaagtgttgtgatatctgcaacttactttgaaatgtttccaaaaataggtggattaatgaatggctgaaaggatggacagaaggaaagataagggatacagtaagttcagcagacgttaaccgggtcgttcactgcacaagtctttcagcttctctatctaaaccaacattttatgtcataaaatattgagactggaagactgcacaaaggaaatatgccactaaaccaagggaaaagacagcaaaatggtcactaaacacgtgcaaaaatgcggccctcactgagaattgcagtaaaacatgattttgcaaatatcaaatggaaaaacacacaggtgatctaacaccttcgagactcaaggggaagcggctcagcccactggctcacggccgccaattcagccggaggccgacccaagcctacactgcccctcacacctgacagaaaagctgcagactcgggggttacccccggagacggaccaggacacccagcaggcgtggcaaaacagtctctatgggagggcgggctagagatgcgagcgcggaactcacgggtgacgctaaggaaagagcgggggcgtccagaccagccccggagcgacctcgtcctcagaggagtgaccccaatcgccacggagcgtccccacccaccaggagaactacgcccctggccagaccctcgccctagcgggcccgacatgcccaccacccaggtgaaacccacccgcggacgcgcccctcgccgccccacaaggacccggcggacctccacccgccaagacttccctccgcaggaaacggaggcagcgcagggctcagggatgcgtcggcacttacggttggcggccggcggcagccatgttccgggcgattgcgcttgcgcggctgccgggacaaggatgtgcgcgtgcgcggagtccccgagcttcccccgcccaacgctggggcggccgcgggtaccgggttattcattaccctggcgtggacttgcctcggggcggacgcgcaggcatttactttctcctatggtctcctctgatttttaacccgatgctatcattcttttgttatagagccttccttttatttactgcataatttcctaaaatatttctttatctataatctttttttgagataataatgttaaaattcagaataagtacactcattattcattggcaatataattatttactgggtgcgtggctcacgcctgtaatcccagcattttgggaggcctaatttgttaaaatgactagatctaagaaatgtaaacaaagccagtaactttcctctgtagtaacaatagccggttgaaaatgaaaactacacattttcattctttcagtggttctcttaaactttagcatggggaagcctaaatatttactgacagggaagagagaaactgtggtatgtgcaacggagcaatagggggtggttaaaacaaacggactgggctcacctaaggtcaggagtttgagaccagcctggccaacatggtgaaaccccgtctccactaaaaatacaaaaattagctaggcgtggtggcaggcgcctgtaatcccagctcctcgggaggctgaggcaagagaatcacttgaacctgggaggcggaggttgcagtgagctgagatcgtaccatcacactccagcctgggggacaagagggagacttcgtctcaaaaaaaaaaaaaaaaaaaaggactaacttatatacaagatagacagttctccaaaaacagttcgaaaagtaaactgtgcacttatccacatgatacaacttacctggaaataaaagacacaaaatctatatgttatacagagattgatacataagtagtaaagtaacaataacatggaccagatagattgtccaacctcaagaaagtggcaactgaggggaaagagttggggaggagacaaaggagacctcagttacacctgtgatgcttgataggaaaaaacaaatcaaaacctgaaaatctgactacatgttaacacaggtaaaatctcgatgatacatgggtgtcatctttattatttatagattattctattactctccgaacctctccgcaggttgaaatacttcacaattttgaaatgaaaattagaaaaaaaattctaagccataatagtgattaaattgtcactcacaatagtgatggttggagcaacttggaaatcaattagcaaaagcaataaaggatcttcatgaagaaaatacaaaaacctcattaacagacctgaagttaagttcagaacacactgacatattattcctgaatggaaagtatttttttaatttctccatgaaggccgtatcagaccaggcacagtggctcatgcctgtaattccaactctttgggaagccgggctggggggatcacctgaggtcaggagttcaagatgagcctggccaacatggtgaaaccccatctctaaaaatataaaaattggctgggcacagtggctcatgcctgcaatcctagtactcggtctcaaaaaaaaaaaaaaaatcttcacaaaactactaaacaaaagtatagcaattccaattcaaagactccccccgcccccagctcacagaataaaacaacttaaagatcatatggagaaaagtccaacagtatctggttaaaagaacagtcggagaccggacgcggtggctcacaactgtaatcccagcactttgggaggccgaggcaggtggatcacttgaggtcaggaattcaagaccagcctggcaaacattgtgaaacctgtctctactaaaaatacaaaaattagccgggggtggtggcgggtgcctataatcctagctactccggaggctgaggcaggagaattgcctgaatcctggaggcggaggttgcagtgagctgagatcgtgccactgcactccagcctgggtgacagctatactctcgtctcaaaaaaaaaagtcaggcaccctttattagatactaaaatgtaccatattaagcagatgggctcaaataggcactaatacagacacaaatatcagaagaatagaagagtatgcaagaagagatgagtaaaagtaataatctagtaataaagttaacaataaagcataacatcattaataataacaagggtgttttttccattcagtggcaaagagaaatccttagtgctaagtactgtgctggcacaagtgtatattcttttttgtattttttgagactgagtctcactctgtcccccaggctggagtgcagtgacaagatctcagctcactgcaacctccaccttccaggttcaagtgaatctcctgcctcagcctccagagtagctgggattacatgcgcacaccaccacacccggctaatttttgtatttttagtagagacagggtttcaccttgttggccaggctggtctcaaactcctgacctcaggtgatccacccacctcagcctcccaaagtgctgggatgacaggcgtgagccactgcgcctggccacaagtgtatattcttgtaggtcacatgtaggcaatctttttctgtgaaaagcccaataataaatattttcagctttgcagaccataaggtctctgccatgactacccaactcttccagatagcagcatagataatactaaacaaacaagtgtgactgcattccaataaaactttacagaaacagaaggcccactgaggccattgtttgccaatccctgttcaggaattatctgtttgttcttggggtaggagactttctacatcaagataagcatcccagaagtcatttacaaaatggcactttttttttctcttagaaatggggtcttgctttgctgtccaggatgtagtccagtggcatgatcatagcccactgcagccttgacctcctgggctcaagcaatcctcccatctcgacctccccagttgctgggactacaggtgtacaccaccatgcctggctaatttttttagtacagatggggtctcactattttacccaggctgctctcaaactccagggctcaagtaatcctcagcctcccaaagtgctggcgttacaggcgtgatccaccctgcctggccaacatatgtgatttttttttttttttgagacagtcttgctctatcgcccaggctggggtgcagtggcgtgatctcagctcactgcagcctccaaactctgcatccccggttcaagcgattctcctgtttcagcctcccaagtagcagggattacaggcacgtgccaccacgcgcggctaatttttgtatttttagtagagacggggtttcaccatgttggccaggctggtctacaacccctgagctcaggcaatccgcccgcttgggccacccaaagtgccgggattacaggcgtcagccacagctgtaacttatttaatggggcactcaaggccttttgctgctggctcaacatccctttcaggccttcactgacctatgccacacagcacttgcgcccagggataaagagccggatcagcttctgctcaccccagtcctcttgccagaaaggccctctggcctttgtccagttgctggacgctgcctcttctttctggttggtctcctcctccaggaggcattcgcgaacgccccagtggagccacacggtccatgcctcttccacttatttccccagggctcacattccacaactactaaatcaacaccgacacactcataagcagccccttcctcgtcctttttttccttctgagctcgggaacgtctgctgggggtgagggggactcgcagaccacccccccccccgccccaggcggaggtcgggggccgtcacctggccaggtgtccggggaacggctcgggcggctgacaccgcagtccgcgagaggcgaggaggatccttggactgtgggcaggatcgcaggcagcggaggccctgcccggaaggcgggatctggggacgatccccattcctcccagccgcagacgcggagcccacaggagtccccgcagccctagcccgtgcacccacggcggagccgaggccgcgactccgggcctgttggctggaacccgcagccgtgtctcgggccgccccggtagcggccacccctgagagcactcggccccgttctatcccgcagtggtttggggagtgcaggtcatcactcccacccgccaaggcggacgccggaccctccattgcgcatgagcgcccactgcggcgccgttgctgcgcatgagtgtgcttccaccgcctacatctcccagaaaaccccgcggcgcggcgctccaccgcttccgccctcgggttgcgttagccgcgacgatggcgccccccagtggcagcagggaggctgtgggggtgctgggcgttgcggtgtgcaggttttctgggaggatacctggcgccgaccttgaagggaccccaacgtgagagggaaagacgcccgtgatgccaaggcttgggcagcggacagccaaaatcctgaaaccccgcggtgctccctgtgattcactttccagaggcccctcagtgccccgacgctggcccggagggcggtcgctgactgtcttgagactgaagctcactttcggatcctgggcgttcttgccaggttttttttattaatacagagaaaaccagtggctttgtgacagttagttttgaaactccctgaggagggccgagcgcagtggctcacgcctgtaatcctagcgctttgggaggccgaggtgggcggatctcctgaggtcaggagttcaagactagcctggccaacatggtgaaaccccgtctactaaaaatacaaaaaattagccgggcgtggtggcgggcacctgtaatcccagctactcaggaaggctgaggcaagagaatcgcttgaacccgggaggcggaggttgcggtgagcctagatcgtgccattgcactccagcctgggcaacaagagcgaaactcagtctcaaaagaaagggagaaagggagaaagagagagaggaagggaggaaggaaggaaggaagaaaagagaaagaaagagtccctgaggagcaagcaattccctcagccaaagaggtaagaactgcaaaattgataaatattgcatttatcttacccccacattttattaagaacattttcaaacatgcagaaaatttgaaacgattgtgtgggcctggcacagtggctcacgcctgtactttctgcactttgggaggctgggaagggagggtcgcttgagctcaggagtttgagaccagtctgggcaacatagtgagaactcgtctctacaaaaaaatttaaaaaattaaccgggcttcgtggcgcgcgcctgtagtcccagctactcaggagtctgaggcgggaggatcccttgagcccggggatgttgaggaatgattgtaccactgcactccagcctggacgacagagcgagaccctgtctcacaagaaaaaaaaaattgtgtgaacacccacgtacccaggccctgggttagataattaatattcgacaatatgtgcttgatccaagtatccattattgcatttatttcgatagtaattaaacaggagattgagtgactatgggccagccgtggaggctcatgcttgtaatctcacactttgagaggctgaggcaggagaatcactggagcacaggagatcaagcctgcagtgagctgtgattgcacttcagcccaggtgacacagtgagaccctgtctcacaagaaaaaaataaaaatgagtgactaatggattcaagccaattagcatctgcttattagcacatatgctttctagttacataaactgagtcaaaagatttcatttctctaaaattttgtcatttaaccatcagagtagagtataacatacagggatgtatgaggactgtattagctaatacctgtgtgctctgcatggtaaaccttcaatgcaaatccactgtttaattactgaagcacatttcggaagaactgctacaagtacaattcctagatgctagcgagaatggcataaatatttaaaatagttttagttatatattatgaaatttcctttcatacgtcttctaccatcagtgtgagaaggtcaccgccacccacgttcacccagcagatactcatgttctctaagctttgcatgtctctgttgttttctgttgttgtttgtttgtttaagacggagtcttgctctgctgcccaggctggagtgcagtggcactgagaggtgacagcgtgctggcagccctcgctcgctcttggtgcctccttagcctcggcgtatgctctggccatgctcgggtagcccttcagcctgccactgcgctgtggagcccctgtctgggctggttgaggccggagcctgctccctcagcttgccgggaggtgtggagggaggaggcgcgggcgggaacctgggctgcgcgcgctgcgcttgcgggccagctagagttccggatgggcgtgggctgggcgggccccgcactctgagtggccagccggccccgccagccccgggcagtgaggggcttaccacccgggccagcagctgcggagggtgcgctgggtcccccagcagtgctggcccaccggcgctgcgctcgatttctcgccgggacttagctgcctccccgcgtggcagggctcgggacctgcaggccgccatgcctgagcctccccgcaacccccgccctgggctcctgcgcggccggagcctccccgacgagcgtcgccccctgctccacagcgccaggtcccatcaactgcccaagagctgcggaatgcgggcgcaaggcgcgagactggcaggcagctccacctgcggccctgtgcgggatccactgggtgaagccagctgggctcctgagtctagtagggacttggagaacctttatgtctagctaagggattgtaaatacaccagtcagcactctgtatctagctcaaggtttgtaaacacaccaatcagcactgtgtgtctagctcaggagtttgtggatgcaccaatcagtgctctgtgtttagctaatctagtggggacttggagaatttttgtgtctagctcagggattgtaaatgcaccaatcagcaccctgtcaaaatggaccaatcagctctctgtaaaatggaccaatcagcaggatgtgggtggggccagataagggaataaaagcaggctgcccgagcccccagtggtaacgtgttggggtctgcatccacatggttgaggctttgttgtttggctgtttgcaatatatcttgctgctgcttgctctttgggtccgcattgcatttatgagctgtaacagtcaataccaaggtttgcagcttcactcctaagccaaggagaccatgaagccaccagaaggaagagactccgaacacatccaaacatcagaagaaacaaattccagagacgctgcttttaagaactgtaacactcactgcaagggtctgtgggttcattcttgaagtcagtgagactaagaacccaccatttccagacacgcacaatctcagctcactgcaacctccgcctcctgggttcaagcaatttttttgcctcagcctcccgagtacctgggactataggggcgcatcaccacaccctgctattttttgtatttttagtagagacggagtttcaccatattggccaggttggtctcaaaactcctgacctcgtgatctgcctgcctcggcctcccaaagtgctaggattacaggcgtgagccactgcgcctggcctgttcactgtttttgtgtaacaacttaccacaaaattaccagcttaaaaaccacattttttttcttttttttggagatggagttgtgctctgttgcccaggctggagtgcagtgtcacgatctcggctcactgcgggctccgcctcgtggggaaagccacgtgtatttattatctcagtgttcttgtgagtcaagagtctgggcatagcttaactaggccctctgtttaggatctccagaggtagcaatcaagctgtcagctggcttcattcccatctgtagacttgattatagaagtatctactttcatgttcattcagttggctgaatccatttcttttttttctttcttttttttttttttttatgagacggagtttagctcttgttgcccaggctggagtgcagtggcgcgatctcggttcaccgcaacctctgcctcccaggttcaagcaattctcctgcttcagcctcttgagtagctgggattatagtcatgcaccaccatgcttggctaattttgtatttttagtagagacagggtttctccgtgttgagggtggtctcgaactcctgacgtcaggtgatccacctgcctcggcctccaaaagtgttgggattacaagcctgagccaccgcgccccgcctgaatccatttctttgcagctgtagagctcacagtagcttccttttttcaggccaccagcaagagtctgtaagtaagccttcttatttatttatttatttagacagaacctcacctcgctttgtcattcaggctgtagtgcagtggcgcaatcatactttactacagccttaacttcctgggctcaagcatttctcctgcctcagcatctcaaatagctgggattacaggcatatgcaccaccatgcctggttaatttttttttttttttttttttgagagggagtcttactctgtcgcccaagctggagtgcagtggtgcgatctcggctcactgcaacctctgccccctgggttcaagcgattctcctgcctcagcctcatgagtagctgcgattacaggcgcctgccaccacgccgggctaatttttgtattttagtagagacggggtttcactatgtaggtcaagctggtctcgaactcctgacctcaaatgatctgcctgcttcggcctcccaaagtgctgggattacaggcgtgagccaccgtgcctggccatgcctggctaatttaaaaaaaaattttttttgtttagccaggcttggtggtgtgcacttatagtcccagttacttgggaggctgaggcaggagaatggcgtgaacccgggaagcggagcttgcagtgagccgagattgcgccactgcagtccgcagtccggcctgggcgacagagcgagactccgtctcaaaaaaaaaaaaaaaaaaaaaaaaaaaagatcagtagatactgagaaggagttggaactgcaaaaggtttattggggggcatacctcacacctctattcacaccacatgagctaacatcctgtttgctaaagctagtctcatgtgttttagtcccaagtcaaggaacaggaagaggttctgtgttaattatccactgctttgtaagaaattaccccaaaacatagctgcttaggccaggcacggtggctcaagaccagcctggccaacgtggtgaaaccctgtctctactaaaataaattagcaaagcatggtgttgcgcacctgtaattccagctactcgggaggccagggcaggagaatcatttgaaccccagaagcagcggttgcagtgagccaagattgcaccattgcactccagcctgggcaacagagtgagactgtcacaaaaacaaaaacgggccaggcgccgtggctcacgcctgtaatcccagcactttcggaggccgaggcaggcagatcacgaggtcaggagattgagaccatcctggctaacatagtgaaaccccatctctactaaaaatacaaaaaattagccgggcgtggtgacaggcgcctgtggtcccagctactcagaggctgaggcaggagaatggcgtgaacccgggaggcggagcttgcagtgagccgagatcacgccactgcactccagcctgggcgacagagcgagactccgtctcaaaaacaaaaacaaaaacaaaaacaaaaaacaaaaacatagcagcttacaacaagggaagacaactttttctgtaaaggaccagacagtaaatattttaggtttgggggactatatggtctctgttgcaactgtcaaccttgttgtagcacaacagcagctattgactatacataatacatgggcagagctgtatttcagtaaaacctatggacagttgagtgtggtggctcacacctgtaatcccaacacttttgggggccaaggtgggaggatcacttaaacccaggagttcaagaccagcctgagcaacaaagtgacaccccatccctacaaaaataaaaataaaaaaactttatgggccaggcgcggtggctcacgtctgtaatcctagcactttgggaggccaaggtgggcggatcacgaggtcaggagattgagaccatcccggctaacacggtgaaaccctgtctctactaaaaatacaaaaaattagccaggcgtggtggtgggcgcctgtagtcccagctactcgggaagctgaggcaggagaatggagtgaacccaggaggtggaggttgcagtgagctgagatcgtgccactgcactccagcctgggtgacagagtgagactccgtctcaaacaaacaaacaaacaaacaaaaaacttcatggacactgaaatttgaatttcatataattttcacatcacaaaatataattattcctttattttcaattattaaaagatgtaaaaactacaattaattgatcacaaccagttacagatttctttgttcttctccactcccactgcttcgtttgaccagccaaaacaacaaaaaaaagaattttaaaaaatataaaaactactcttagttcataagccatcccctccccaaaaaggcaacagacgggaccagacctggaaactatagtttgctgactcctagcagtaacaaattaccacagatttagtggcttaaaacaaaataaagttattatcttatagttctggaggtcagaaatccaaaatgggttggctttcctttgggaggcatgagtggagaatacatgccttccattttccagcttctaaaggacacttacattgctaggtctatggccctgagtcactccaacctctgcttccatcatcaaaactcgttttctgattctgactcttctatcttcctcttccacatttaagtatccttgtgaatacactgggcccactcagataatccaggataatctctgtatctcaagattcctaatttattcacatctgtaaaaattcttttgccatgtgaagtaacattcacgaggttctagggatgaggatgtggacatcttttggaaaccattactgagctcactacacagtccaagaaggcctctctgaggaggtcaatgttaatctgacttctcaagtaaaagaaggagccaacatactgaggaagagcattttggtagaaggagagcactagcaaaggctctgaggtggagagaatttggtacaatcaagaaaccagccaggcacagtgagtggctcatgcctgtaatcccagcactttgggaggtcgaggccgacggatcacttgaggtcaggagtttgagacccgcctggccagtatggtgaaacccatctctactaaaaatacaaaaattagctgggcatggtggcgcgtgcctgtaatcccagccacctgggaggctgaggcacgagaattgcttgaccccaggaggtggaggttgcagtgagccaagatcacgccattgcactccagcctgggtgacagcgagactcgttccccaaggaaaaaaaaaaaacaatagcaggcagtgaagacagaatggatgggcaaggggagagagcagaagagtcaggggaaatctggctgacatgtgccaggccttgtgcaccttgattaggagtttgggcttcaccctgaaggagacaggaaaccagaaggggtggagttaacctcgggagtgacatgatctaatttgcaccattagaagggcactgcctgatgtgtgggggaagatctccagcaggcatttagtcacaggctttggaaattcagaagctgagggttagtgatctcgacttggaagtcatcaacataacagtcgaatggtgagggatacaagtcacctcaaacaattggccaagaaacagtcacggtgatgccatgctaggtactgttgccaaggaaattagcaaacagatttggaatctgcctttatgtagcaatcagcatagtgaatgtggatgttctacaaaaaagcataaatatttgagagcaatgagaagtcactcgttgaatttaagcaagagaattaaatgatctagtttacattttaagagagacagggtcgggagaggggggagggatagcattaggagatatacctaatgttaaatgacaagttaatgggtgcagcacaccaacgtggcacatgtgtacatatgtaactaacctgcacgttgtgcacatgtaccctaaaacttaaagtatatataaataaaaataataaaaaaaataaataaataaataaaagagacagggtcttgctgtgtcacccaggctggtgtgcagtggtgcaatcatagcttgctgcaaccttggaatcctgggctcaagaaatccccccacctcagccttccaagtagccgaaatcataagtgcacaccaccacacccggctaattaaaaaaaaactttttttgtagagacgggggtctcactgtgttgtccaggctggtctcgaacttctgaactcaagtgatcttcctgccttggcctcccaaagtgctggtattacaagggtgagccaccacacctggcctgatttccatgtttgaacggttgcactggttgagtgttgggatggtgtcatgaacagaagaggagatgatgatgaaagcactactgtgtagttcagtcaagaagtgtcatgacttggaaccggatgagtcaatggaagtaaaaaggggatcatttcaatgtatgtttaaggtgggctcagaatttggtgattgattcaaaatggaagtggaagggtccatggctactggcatgagcaactgtgatgcaatccatggacaggagaaacctgggagaagaggaggtagagcatgagagtagaactcagtactgacaaggtatggttgtaaaatgaatagacactcccagcaggcagtatgaatatggtgaaatatgtccatgctcagaaaagaatctggaatgaagctacaaattgtgattcatcaatgttcagatggtgtttgaagccagcagaataaaacagaccatactggtggatgagagaagagggctcaggacaagcccccaaagcactggggtccagaagagcatcttgaaaacagcgtgaggagactgggcgcggtggctcacgcctgtaatcccagcactttgggacgctgaggctggtggatcacgaggttgggagatcgagaccatcctggctaacatggtgaaatcccgtctctactaaaaatacaaaaaattagctgggcatggtggcgggcgcctgtagtcccagctactcaggaggctgaggcaggagaatggcgtgaacccaggaggcagagcttgcagtgagccaagatcgtgccactgcactccagcctgggcgacagagcgagactccgtctcaaaagaaaaaaaaaaaaaaagaaagaaagaaaaagaaaagagagtgagaaatgactactagcagagattgatctattttcctatcagccacctggagagactgggcttattcttatttgctcagtcgctcctggcaagacagatttggaaacaaatcaacatgctttcgatgtgcttaataccagcattttctctccagctcttaaaattatggttttttaattgattgaacaagccataatttattcagtgaacaactgtaggggatgtacaaatgtatctggtttttttttttttttggattgtgaaactatcatcaaaagcaaagagataaccaggaaggaagacatttgtctgaaaaccatatgccaggccaggcgtggtggctcatgcctgaaatccgagcactttgggagactgaggtgggtggatcacaaggtcaggagtttgagaccagcttggccaacacggtgaaaccccgtctctactaaaaaaaaaatacaaaaattggctgggcatggtggcgtgtacctgtaatcccagctacctgggaggctaaggcaggagaattgtttgaacccaggaggcagaggttgcagtaagccgagactgcgccactgccctccagcctgggtgacagaggacgactccgtctcaaaacaaaacaaaacaaaataaaaacaacaacaacaaaaatgccatcctgaaagtggaaagattcacaaagaatgagcttcatttcttcacatttggaagaaaccaggactgtaaggtccacttagagaagcagaaggaggaccaggagagatgagtcaaacaaatgatgcttgaggaacactgattcaggaatgaggttgcaagaataagaaatgcacagctaatgttaagtagaattcaagccttcttccactaaacaatattcttttttgttttgttttgttttgtttttgagacagagtcttgctctgtcacccaggctggagtgcagtggcaggatctcaggtcactgcgagctctgcctcccgggttcatgccattctcctgcctcagcttccagagtagctgggactacaagcgcgcgccaccacacccagctaattttttgtatttttagtagagacggggtttcaccgtgttagtcaggatggtctcgatctcctgacctcatgatccaccctccttggcctcccaaagtgctgccattacaggcatgagccaccgcgcctggccttgtttttgttttttgagacagagtctcattctgtcacccaggctggagtgcaatggcatgatcttggctcactgcgaccttcacctcctgggttcaagcaattctctgcctcggcctctcaagtagctgggattcaggcacccgccaccacacctggctaatttttgtatttttagtagagacaggggtgtcgccatcttggccaggctggtcttgaactcctgaccttgtgatccacccacgttggcctctcaaaatgttgggactacaggcgtgagccaccgtgcctggcccactaaacaatattcttatcaatgaataccactacatacatgactcattgtaaaacaacattcagatttaataaaccataaatgcacagggaaaaacccctgaaaattatgattttgggaatgcttttggtcaaaacactcaacttcttagacttgcaaacagttcagtgtagaaaagccttatatatgaaatatacgtagtaaattttttaagtgtagcacaagtctcagtcaatgtaagcgaattcatgttagagagagttgagttgaatgtaaggaatgtggaaaagtgtattcagagctcctctcatctttgttttgagagcactcacacagttgacaaaccctccagatgttctgaatgtgagaaatccctgtttatggtaaatactttctgacatcagagaagtcatactggagagagaccatataaatgtagtatgtgtaaagaagtctttaaacagagctcaaccccactgatgtatgagcaaactctctcaggaaatagaccttacaaatgtgttgagtgttggagagtctttattaagaaatatttctttcagtatgtttcagaacttatacaggagaacaatactataaatgtaatcgctgtagcaaaggctgtagacacaaattataccttattcaatatgagacaatttatacttgtgggaaattatatatttgcagtgaatttaggaaattcttctaaagaagtgaacacttttaccctatagctaagaatctatagagacaccttatgaagggaatcattcagggaaaggttttacactttgctcctccactactcaaaaatcacagaagacacactggagagcaaagtgatggatacagtcatcgtgggaaaggcttcagacgtagcctagcccttatgatgtgacatcagaggactcatactgaggaaaaccccatacatgtaatttgcgtggaagagcattcaggagttgttctcatattattgaacgtaagaggactcatactggagaacactatgaatgcagtcagtattggcaagctttcaaccatggcttttaccttatttgacaccaggaaattcaaacaaattagaaaaactcattgaaaaaagatcaatgtggaaaagctattggttggaattccattttatttgacatcagggataaaggaggcaaaagccaccagttattttttaactcttaagtatctgaatgtaacaagactgcaaacttgtgactccctgcagccacagatcagcagggataagcagttctattctacatatgtccctaatttgccatagaaacaccatttaatggggactcagggtctaggcctgatgaacaatgtctcatagaaatgtctggccatatgcggctgggcacagtggctcacgcctgtaatcccagcactttgggagtccgaggcgggtggatcacgaggtcaggagatcaagaccatcctggctagcaccgtgaaaccccgtctctactaaaaatacaaaaaaaaaaaattagctgggtgtggtggtgggcgcctggagtcccagctactcaggaggctgaggcaggagaatggtgtgaacccaggaggcagagcttgctgtaagccgagatcgtgccactgcactccagcctgggtgacagagcaagactccgtctcaaaaaaaacaagaaaaaaagaaaaagaaaaagaaatgtctcccatatgcctgtaatcccagctacacaggaggctgaggcaggagaatagctgaacccaggaggtggaggttgcagtgaaccaagatcacaccactgccctccagcccgggcaacagagcaaaactccatctcaaaaaaaaaaaaaaaaatggttgccatagataatcatggctgggcacagaggctcacacctgtaatcccagcacttttggagggcaaggcaggtggatcacttgagctcaggagtccaagaccagcctgtgcaacatggagaaaccccgtctctaataaaaatacaaaaattagctgtgcgtggtggtgcattcctgtagtcccagctacttgggaagtgaggactgcttgagggggtcaaggctacagtgagctgagatggtaccactgcactccagcctgggtgactaaacgagaccctgtctaaaagaaaagaaaagaagagaaatggttgtcataggtaatcacatgtaaatttttttttttttaaagagtgagcaacagtaagatttattgcaaagagcgaaagaacaaagcttccacagtgtggaaggggacccaagcgggttgcccataaatgttatcagtggcaacagcgtatctgtttttctacatcacgtatgaataaaagaaccgtcaaccttgaagaatggtgcaggaatcatatggcaacagcgtatctatttttctacatcacgtatgaataaaagaaccgtcaaccttgaagaatggtgcaggaatcatacaccttttagcatcatggggatccttatgtgtataattttatgatagtcctagatgagggctgaaggatatgctatcaatttttttctgcataatccaaatattatcactccaaacaaatcagagagctttatactaacttgctaatactttgccaatagcattcttctatctacttgaatagaagcatcataaagagttgtatgttggccaggcacggtgactcacacctgtaatcccagcattttgggaggccgaggcaggaggatcacctgaggtcaggagtttgagacaagcctggccaacatggtgaaaccctgtctctagtaaaaatagaaaaattagctgagtgtggtggcacatgcctgtaatcccagctacttgggaggctaaggcaggagaatcagttgatcccgggaggtagaggttgcagtgagccaaggttgtgccattgcactccagcctgggtgacaagagcaaaactccatctcaaaaaaataaaaaaaatgagttgtacgtatcttcacatttctaagggcatgtccaatgtcttggcagggttaaaaagacatcatagtctggtgaagtacccatactccaaaactagtgcaaacttcacaagtttcattgcaaatcccttacaaagagcacagggtatgtataagcagcattggtttctcttctgaaaccctggacactagaagataagtgaagattccagaaacacaaagactctgatttcaggatttgatgctcagcaaatatatcattcacacatatgaggagagagtaagcattttcagacctgttagcattcaaaatttgtattctttctggaaaaactgcccaagagaacataatagtaatttcttacaatggaagtatgagccatgtccccaaaagacatctaaaaggacactcatagaagcattagtcataaggggccaaaactggatacagcccagcagtccatcaataataaaatgtataaacaaaatgtggtacatccatagtggaatactactcagcaatttaccaaacattaactactgatacatgcagcaacttggatgaatctctaacacattatgttgacacagaaaaccatagactatatgattccatttatatgaagtttgaggacagaaaaaaaacttatgatgataatcaggatagtggttaactctgggagatattaaccaggaagtggtacagggttttggaaatatattttctgttgacctgtgtgatggatttttatatatggacattatatatttatatatttagacatatataaaaaaactcatcaagttgtgaagttgaggactttatgcctatatatatgtttatgtgtatatatatgtttaaagcttatatagtttatgtatataaaggttacatataaactttaatttaattaattaattttttgagacaacagtctcactctgttgcccaggctggagtgcagttgtgtgatctctgctcactccagcctctgcctcctgggtttaagtgattctcctgcctcaaccacctgaggagctgggattacaagcaagcaccaccacacctggctagtttttgtatttttagtagagacagagtttcaccatgttggccaggctagtcttgaactcctgatctcaagtgatcctaatgccttgacctcccaaagtactgggattacaggtgtgagccaccgtgactggactaaactttaattttaaaagttttaaaacggccgggcgtggtgactcgtgcttgtaatctcagcactttgggaggccgaggtgggcggatcacgaagtcaggagatcaagaccatcctggccaacatggtgaaaccccgtctctactaaaaaaatacaaaaattagccaggtgagacggtgcacgcctgtagtcccagctacttgggaggctgaggcaggagaattgcttgaatccaggaggtggaggttgcagtgagtcgagattgcgccactgcactccagcctgggcgacagagtgagactctgtctcaaaaataaataaagaaagaaataaataaaagttttaaaactatatgcaagctggccgggcacagtggctcacgcctgtaatcccagcactttgggagtccaaggtgggcggatcgtgagatcaagagatggagaccatcctgactaacatggtgaaacctcgtctctactaaaaatacaaaaatcagctgggcatggaggcgagcatctgaagtcccaggtactcgggaggctaaggcaggagaatcacttgaacccaggaggcagaggttgcagtgaaccgatattgcgccactgcactccagcctggcgacagagtgagagtccatctaaggaaggaaaggaaaggagaggagacgggaggggaggggagagaagggaaaggaaaggaagaagggaagaatagagggaagagaggagggaagagagaaggagagaaagaaggaaagagagaaagaaggaaagaaagaaggaaagaagacctatatgcaagctgatgggatgatgggatccaaaggacttatgctgccattttaaacagtctccaaacaaagacaaaacaaatgcctctgccactgctgtgctatgagtcaggatgcttgctgggctggtagcagctaacccacgtcatcagataatgtttactcacatgcctggagagttagccagaatagcttcaggatcagtatgagccagcagctcaacaatgtctccaaatactcaatttccttccacccttcccctcagtggtctgcagtattgattattcttaaattggctcccactgacagccttatggctcagcttcttctttttttttttttttttttttggaatgaagtttcactcttgttgccctggctggagtacaatgtcgcgatctcggctcactgcaacctctgcctcccgggttcaagcgattctcctgtctcagcctcccgagtagctgggattacaggcgcccaccaccacgcccggctaatttttgtatatttagtagagacgggggtttcaccatgttgactaggctggtcttgaacttctgaccttaggtgatccacccgcctcagcctcccaaagtgctgggattacaggtgtgagccaccacgcccggccaatatggctcaacttctttcaagagactgggctttttttttctgtattagtttcctatcaccactgtaacaaattactacaaactcagtgtcttaaaacaagagataagagaaatattaaagtaagacaaatagattctctcatttctggaggccggaagcatgaaatccatacctgggccaaattcaagccttggaggctccaggagagaattcattccttgcctcttccagcttatggtggctgctggcttttttttttttttttttgagacggagccttactctgttgcccaggctggagtgcagtggtgtgatcttggctcactgtaatctccccctcccgggttcaagcgattctcctgccttagcctcccgactagctggcatgacatgcgcatgtcaccacatccaggtaatttttgtatttttatttttaatttaattttattatttttttattttttgagacagagtcttgctctatcacccaggctggagtgcagtagcacgtctcagctcactacaacctctgcctcctgagttcaagccagtctcctgcctcagcctccccagtaactggggttacaggcgtgcaacaccacgtccagttaatttttaaatttttagtagagacagggtttcatcatattggccaggctggtctcaaactcctgacctcgtgatccacccccccttggcctcccaaagtgttgggattacaagcgtgaggtaccccgcccggcctatttttattttatttttttatttttttgagagggagtcttactctgtcacccaggctggagtgcagtggtgtgattttggctcactgcaacctccgcctcccaggttcaagcaattccctgcctcagcctcctgagtagctgggattacaggcgcctgccaccatgcctggctaacttttgtatttttagtagagacgggttttcactatcttggccaggctagtcttgaacttctgaccttgtgatccacccgcctcagcctcccaaagtgctgggattacaggcatgagccactgtgcccagccaacttttgtatttttagtagagacggggtttcatcatgttggccaggctggtctcaaactcctggcttcaggtgatctgcctgcctcggcctcccaaagtgctgggattacaagcatgagccactgcgcccggcctgctggcatgttttgacttgtgactgcacagctccagtctctgcctccacggtcacatcaccttctccttttctgcctatgtgtggtcacatctgtccctgcctccctcttgtaaagatacatgtgattacatgcacaatccaggatcatctcccctctcaagatctttaaatacatatgcagcccctgtctctacataacgcaacattcataggttccaagaattcaggcctgacatctttgggggacatttttcagccaaacacactctcctaacttttaatcaaagtcctgggcttcactctccgtccatgttcattgctttgacacttgtcatggacaggagggtgccttgcactgactggcttggaccagagtgcttgcatgcccctggattaatcactgcagcaacggagacagaatgaggccagtgggccatccactggagctgagattgaggggcagcttcacccatagctgcccaaaagggtatctggggtgttctgagggtgttctggggtgtatctgaggaaagggatgagtggaaaggtctcacaaatgaatctttttttttctttttttttgagatggcgtttcactcttttttgatgggcattgcccaggctagagtgcaatggcgcgatctcagctcaccacaacctctgcctcccgggttcaagtgattctcctgctcagcctctccagtagctgggattacagtcatgtgccaccacgcctggctaattttgtatttttagtagagatggggtttctccacgttggtcaggctggtctgaaactcccgacctcaggtgatttgcccacctcagcctccaaaagtgctgggattacagacgtgagccaccgcgcagcctcacgtgaaaaagacttttctctcaatttcacaatctgtctctctgtctctctctctctgtcacgttttgaaattctggcttccctcctatacccaagggagagctcacacttctcccttacctgagcgaaatgccatctttcccttccagcaccccattcaatcctccaccagggtccccatgtcctggtagctgctccctggatgttgggacttcactcagttccatttttttttttttttaggagacagggtctcactctgttgcccaggctggagtgcagtggcctgatcataactcactgcagccttaatctcccgggctcgagaaatcctcgcacctaagactcctgagtagttgggattacaggcacatgtcaccatgcccagctaatttttaaatttttttggtagagatggagtctcactatgttgcccaggctggtctttaactcctggcctcaagtgatcctcctgcctcagcctcctaaagtgctgggattgcaggcatgagctgttgaccctcagttccagatctttgctggcagcaagtccggaaacttccatccggatctggtttgtggccttataacttaatgtgaggagaggtctctggggtagatgggctccacccaagcagacttttgtgccagctactgtggctgtgccacccaccttcattgcagcacagtctggcgccttctacagatgccaaaaaaaccagttacactcttttccagcttttctcccagccaggacatggatgcatgtgtcaatcctggctaacagggtcagagcgagtcaacaacagagaagtcttccgaaaatgttgtattactttttttttttttttttttttgagacaaagtctcactctgttgcccaggctggagtgcagtgtcgcgatctcggctcactgcaacctccatctcccaggttcaagcgattcttctgcctcagcctcctgtgtagctcggactacaggcgcgcaccaccacacccggctaattttttgtatttttagtagagaaggggtttcaccgtgttgaccaggctgttctcgaatgcctgacctcgtgatctgcccgcctcagcctcccaaagtgctgggattacaggcgtgagccactgcgtccggccaaaatgttgtattacttctttgtggtagggagagtaatgccccctttccttcagagatgtcctcattccaaaccctggaacctatacatatgttaccttcgcatggcaaaggggacattgaagatgccattaaggatctgtttttgttttagagacagggtctcactctgtcacccaggctggagtgcagtggtgtgatcatggctcactgtagcctggaactcctgggctcaagcgatcctcctgcctcagcttcctgagtagctgggaccacagatgcatgccaccacacccagctatttttgttgttgttaagacacggtcttgctctgttgcccagaccagtctcaaactccttggctcaagcaatcttcctgcctcagcctcccgaagtgttgggattacaggtatgagccaccatgcctggccagattcttgagatggggagattattctgaattacttggggcgggccctatttaatcaaatgtctttgtataacttgaggcaggaatcagagtagatgatgtgatgatggaatgagagatttgaaaatgctacactgctggctttaaaattggaggaaggggccataagccaaggaaggcaggtagtctctagaaactggaaaaggcaaagaaatggattctctcctagaccccccagaaggaccacagtcctgctgacatctttattttagcctagtaagacccattttggacttctgacctccagagctgtgagacaataaatttgttgttgttttaagacacaaagttttggtaatttgctacagtggcaatagaaagcaaatacacttcctgatgccaacttcttcagccaaatgttgcacggctaaatgctagacttggaactgtaatcaccatcttaggactgcaaagacgtgtgcctcagaaagaaccaaggccatacactggggagggctgagccaaaggagggacagtgactggttacagctcatacttgagcccaggggtcaaccgtagaagcccttacatctggatttaattacattttttattttgtaatttttagttttatttgtgctgagacagagtctctggagtgtagtggtgcgactacagcctcaacttcccaggctcaggcgaacctcccacctcagcctcccgagtacctggattacaggtgtacaccaccacacgcaactagtgttttgttttcgtagggatggaatctcacacaaaaaactgggcaagtatgttccccaggctggttttgaactcctgggctcaagcagtcctcccaccttggtctcacagtgttgggattacaggcatgagccactgtgcccagcctggacttaatgaaaaacaaacaaacaaacattttttttgagtcagtcttgctttctcacccaggctggagtgcagtggtgtaatctcagctcactacaacctctgcctcctgggttcaattaattcttatgcctcagcctcccaagaagctgggattacaggcatgcatcatcacacctggctaatttttgtatttttagtagagaaaggtttttaccatatcagccaggctggtcttgaactcctgacctcaagcagtccacccacctcagcctcccaaagtgctgggattacagatgtgagccactgtgcccagtcagtgaaatttaagatcatgaatggtggcatactgtcacttctgccaaaactacaccttacatgataaccctttcttgctccccaccagcttttgctctcaagtctcgtttggtcatgctaagccacagtttggggactcctaggagcagccatcacaggtaaccagttctgctggctcaggatggcccctgctgccctgactcagagacacttcctgcaaggcagacatctcatgcagagcagaggccactgcagtcagaaggaagggcctggtagcctcagaggcacagccaaggggctgcaacgatggaaaggagatattccacaagtccaagagtgtgacatggaagcacactctgggatgtggtggactcaagtgatccatgcagatgtggatgctgtctctctttctctgttcatagagtgtggcatgggtcctctctgggtgaaaataggtgcccagaattaatcacacacttccattcaaaataaactgtgccaacttgctgaaccacaaaatgatttcctcgccatggcccctaaataactccgtgataagaactgtatgctattgatggctctgaagtccaaatttattggcaaaagcaaagaacatgcctgaactagtcatttctgcaggcgtttctccttaagatgagtttgaagccaattggttatgtgaagaatagcaatcagttctttctcacactggaggaggaggaagcacaaaagaaagttcaagggtcaagcctcccaaaaggctctgttataatcctatgtgctctttcattgtatctagtgatgaatttgggtaactgacactttactcattggccatctatccttgaacttgataagcattttcatttatgtaagtttacttgtaattcttccaaaacttatcttcacatttcccaacaaactaatttcagacattttgtttttatgattctattgtgacaggaacctccatttcaatatacttgttgcaggtatagattttgtgcattgctttgtggtgttgatttgtccatcttttgtattctgcctagcttattgtaatcttgatttttaaagttttcaattgggtttttaaagtatgttaatgttaataaatgcatttttaggtttcctttcccaatcattacagcactcaggtctatttcatatcagattgattgatttattaagacaaggtcaagctctgtcgcccaggctggagtgcagtggcataatcagggctcactgcagcttcaacttccttagctcatgatcctcctacttcagcctcttgtgtagctaagactacaggagtgtgtcaccacatccagctacattttttgctttaatacagatgaggttttgctacgttgctcaggctggtcttgaactcctgagctcaagtgaccctcccgccttggcctcccaaagtgctgggattataggtatgagcctggcctcatactttatttgtagtaacaagaatatctggaaaatgttcagcattgctgagagcagatttctgtcattttcgatgtgtgtatcctccacggttattgaatggaggaataaacaagaaaaagactcaagaagagagacaggagtcagttctcatcagagaagaaaaggtcgatttcctaaggcaggaaatattgagatgggttgtgttcaggactagcaggaggtgtgtggctggcttgttccttgtctacatcctaatggcctaaagaaaagatgccccacactaaggacagcaagagggaaagagtgagcctcatcctccgtgacttcagtgggcagcttaaccagcaccagaaaagacctatacttgcagattttctttgtgggaaaacggcgttggttatttgggtttttatttatttccaaccaaacatgccttaacggatacagggtgcaaaggcatgtactagattattccaaacctgcctcactggtttgtccggcattctgtggacttcctgcattcctctttgaggcaggccgttttctggaggttgtttgtgatcggcctctgctcagagcccaaattcttagcctttcccccatgtgttatgtccagtgtggattatcttgatggtgagtttacctttgatgttggggaaaacaggcaaagaatgaatgagcagcagtaaccaaagagcctcttttctgggaaaaaagctatgatattaataatttatagttcaaatgcacattaatttatccatacttctgtaaccttacattcccaagctctcagaagttcagagaggtgtcctcaaagctcacatttcaaagatggaaagacacatctttcttctttttaaaaatgattttaaaatgtatccccctttacatggaacaatttgagatgctctgtgtgatgaaacagagacagagaatgatgagtggagatcaaatcctgggtccatgattcagttgcacagctggcttaggactcagttgaacaccactagctgccataatggtccagctgccataatggtttgggccaacttatagctttacatattttattcttagtcatatgttgtttatttattatttatttattcatttatttattttgagatggagtctcgctgtgtcacccaggctggaaggcagtggcacaaactcggctcactgaaagctccacctcctgggatcatgccattctcctgtctcagcctcccgagtagcggggactacaggcgcccgccaccatgctcggctaatttttgtatttttagtagagacggggtttcaccatgttagccaggatggtctcgatctcctgacctcatgatctgcccaccttggcctcccaaagtgctgggattacaggcgtgagccactgcgcccggccatatgttgtttaatttaaaccaacagtagaccattgatttaaaaaagcatatggggccaggggcagtggctcactcctgtaatcccagcactttgggaggccaaaatgggcagatcacctgaggtcagaagttcgaaactagcctgaccaacatggtgaaaccctgtctctactaaaaatataaaaattagctgggcgtcgtggcatctgcctgtaatctcagctattagggagaatgacgcaggagaaccgctagaacccgggaggcagaggcggaggttgcagtgccattgcactccagcctgggcaacaagagcaaaactccatctcaaaaaaaaaaagcacatggaaaaatattaatatatttaaataactcagtatctcaataaacctatgcctgactatgtggaatatatatatatttgagatggagccccctttagtagagacggggtttcaccatgttggccaggttggtctcgaactcctgacctcaggtgatccacccacctcagcctcccaaagtgctgggattacaggtgtgagccaccgcacctggccctatgcagactatattaagagagaaaaagtaaaaattaaactttgcaattgaatgaaataactactatttctacaacacacattttcacttatgatccataatgccttctatgtaattcaaaattccagatattttctaacagaaaatttctccctgttatgagtctgcaaaatttatatgaacaaggctatttatattttgtctctcttccacctagtgtaaatcttcttgtattttgctacagatatactcatgtgtttgatggcaggtgctaccccacacctcttagggatttacacactgtatggtgtaaatacattaccatcctactaaaatccaaatgatcatgaattccaaaatacatctggctcagaaggttttgaacaagcaatcgaggcactgtctaaatccaacaacgatgaataaattttttcaacattttacatgtttaatagttaacatttcttcagaagtcatttttattttacaaattacaataaacagcatatttaatttgctaaacaggaaaagagtatgcagttattaaaagttgaattaaaatggctctcataaatcaatcttcaataatatgcttatataaaaccatctttaggttgggcacagtggctcaagcctgtaatcccagcactttgcggggccgaggtgggcggatcctctgaggtcaggagttcgagaccagcctggccaacatggcaaatccccatctctactaaaaatacaaaaattagccgggcatggtggcacgcccggctactcaggaggctgaggcagggagaatcacttgaacccgggaggcagaggttgcagttgagccgaaatcacgccattgcactccagcctgagcgaaagagcgagactctgtctcaaaacaaaaaaaaaaaaacaaaacatctttggtcaggcatggtggctcacgcctgcaatcccagcactttgggaggccaaggcgggaggattgcttgagtccaggagttcaagaccagccctgacaacacactgagacctcatctctacacaaatatttattaaaaattagccaggtgtggtgatgcacaccagtagtcagtcctagctacttggaaagctgagatgggaggaacacttgagcccaggaggttgggccagcagtaagccatgactgcagcactgctctccagcctgggcaacagaacaagaccctgtctcaaaaacaaattcttttaatcaaaaatcaggttttatcctataccacataaatagaaagaaatcattagaagaatttccacctgcctgggcaacatagtgaggtttctgtctctacaaaaaagtacaaaagaggccaggcggggtggctcatgcctataatctcagcactttgggaggctgaggtgggcagactgcctgaggtcaggagttcgagaccaggctggctaacatggagaaaccccgtctctactacaaatacaaaaattagccaggcatggtggcacacacctgtagtccaagctacttgggcagctgaggcaggaaaatcgcttgaacccaggaagcagaggttgcagtgagccgagattgtgccacctcactccagcctgggcgacagagcaagactctgtctccaaaaaaaaaaaagccaggtgtggtggtgtgcacctgtcccagctatttgagaggctaaggtgggcggatcacttgggcccaggaggtggaggctgcagtaagctgtgatcgcaccaatgcattccagtcggggtgacagagcaagaccctgtctcaagaaaaaaaaaaagaaagaaaaaaaagaatttccaagggggtttgcttccttgtgattatgaagggctagacgtatcctattcaaatccagaacaaaacaagactattagtaaacatgactacttaacatagctctgtcatactagctaggactatacaatgttaattttttaaagttgaaatatggaaaaagaagatatcaaattacttattaattggggatggtgttgtatctataatagacacgaaaaatccaatgaaatattattagactataagatatctgcacagtctctgagtaaatactcctatgccaaaatcaacacactaacagcaacaattaaacaatgtgtagcctgaggttggatcctccacagtgaccaaaaaaaccaacaacccgtggaacaagtttagcaggcagtgtacacgaccaccagagggaggcagagggctgctgagacctgccaggaaatatcaagaaagaggacacagggtcctgagcactgagagagatcattagggccctcaggtcccaagaagacaagaccatactgggacctgggacctaaggaagataagaaaacaccagatgtcggtccttgaggaagccaagagaatacctccttgtcctgagctcccaaggaagatgagagcaccctgggcccaaggatgggtggcacacaccaggtcctggacagctacagacttaggtttcctctccctagacatgagcacctcagcttccaggagcaaactggaccacagggggacactaggcagaggatcctgctcctcctccccaatgcctggggtacagttagccctgatcatctctccagaactagggtagacgtttggcctcattcccatcacacttgtggtccacctagtcttccctccttccccttgcacacccctgaccttcctactcccttcctctaatccccagaactagggtggacgtttggccacgttcccatcacacttccggtcctccgagtttccctcccctccctgaccttgagtggacacttggccctgtccaccctcactttcaggcaggacccatctcccagaaacataagtgccgtcagtcccaactcctgcacacttccggctctcccagtcctccccttctttctcgactttgaaactggtggaacttcagtacctctccccactccccccgcgacttccgtcttccagtccccctccttccccaaaagttgcgtggactctagccccgcctcctacattctccccgccctccctgtccccgcccctccacccagatggacggccagttaggcccgccccctgcacttccggccctacccgcccttcctcttcccaagggacgtcataattaatcccgcccccaccgccacccaaccaagcatcacccattccagcacttccggcctgacccctgtccagcgcctttcctttctccagcttctgctctgccccaagagtggtcgccttcgtggcagggcacgactctctcccagctcgggtcgccgcccacattagtgtggggccctgcggcctagcgtccctcaccagaggcctccccttgcctagctggaccgccgagggacatcgacgagtatcctcctcctgctgtccccggcttcgcctgccgcccctaaccggccagtcaagatggccgccgctgggtgaggcaagctggcgcgccgcgggggcgtctgggagttgtagttcgggacggcgggctgacgcacttcgccgccggccgacgggcgccattgtgcggcgcgcgccgggtgagtgccgcgcgaaacctgcgtccgtcgggggctgcgctgggcgggtccagaaccgttagttgggggcgagcgcggcctctgcattttccgccgagctcgggtaccctgagccggccgtgcctgcagtcctcccgccgctctgtgggatggggtcggtgacccggaaccccgaggggagacagtgctttcggggcgccgcggtggagagaacagatcgcctccggaagcgtggggtctgggccagggaggcgatcccctccgatgcgcgggacagaggaggctcggtgtcctctcggggaggggaaaactggtcctatccagtcctgtgggagtcctatgactcactctgggcgttttccagtttgggtggacttgtcatttcccgctgagggagccgttcctgggcggaggctgcggtagctccccagcggacaccttaagcctctccctcccctcccaacttcggtttcctcaggactctgcccacttccaccagagacacattgagaaggaggaaactatggcctccaggcttccgacggcctggtcctgtgtgagtagaggcttccttcagcttttgagtccgctactgcacctgggaggatgcggatggtggtgagataccaccttccctgagatacccccatcctccagagcacctcggggagggggtagagattggttgggcatgagagatcctgcgtgatggtggaaccgcaggttgcttggttttccaagggtgtagttagaatagagaccagattgtaggggcttctgaaggccaggttaaggctcttgcttgtatcctttatattgggaagagtaattgacaggtcttttgtttgtttgttttttgttttttgagatggagtctccctctgtcgcccaggctggagtgcagtggcgcgatcttggctcactgcaacctccgcctcctgggttcaagtgattctcctgcctcagcctccccgagtagctgggactacaggcgtgtgccaccatacccagctaattttttttttatttttattttttgtgtgtgttttttgtggagacggggtttcaccatgttggccaggctggtctggaactcttgacctaaggtgatccgaccatctcggcctcccaaaggtctatgcagggatcaggcttatgtttagatttcagcagataaattggcatcaagcaagaggtgacagcagcagagttcaataacaagtagaaaagacaggtgaggatggatccctgacaggtgaaggagatagaaagaagcatcagggccctgggtaggggctgacggcttgggtgtgatggtgcagctcagagaattccctaggaggcatacgcaccactcccaaagtcagaattttcaaatgaataagaaatagggggccgggcgcggtggctcacgtctgtaatcccagcactttgggaggccgaggcaggtggatcacgaggtcaggagattgagaccatcctggctaacatagtgaaaccccgtctctacttaaaaaaatacaaaaaattagccgggcgtggtggcgggcgcctgtagtcccagctactcgggaggctgaggcaggagaatggcgtgaaccggggaggcggagcttgcagtgagccgagatggcgccactgcactccagcctgggcgacagagagagactccgtctcaaaaaaaaaagaaaagaaaaatagggccgggtgcggtggctcacatgtgtaatcccagcactttgggaggccgaggcaggcagatcacaaggtcaggagttcgagaccagcttgaccaacatggtgaaaccccatctctactaaaaatacaaaaattagccgggcatggtggtatgcgcctgtaatcccagctactcaggaggctgaggcaggagaatcgcttgaacctgggaggtggaggctgcagtgagccaagattgcgccactgcactccactaggagacagagtgagactctgtctcaaaacaataaataaataaattaaataaataaataaataaataaaatggacagattttcatatgctacagagatctcatgtgttgctctccttattgtaacctgaatagagtcaagcttgggtttgcttggggtttcagacaaagacaggaactcaggatgagactcccaaaatgcccttgggtcatcttgtagaccattctgtgctttcactggcctggtcagcctcccctgtctttcttttgtcgtggatgcggatggcctgtggctgaacaagaatctggatttttaggaaccagtgacctttgaagatgtaacactgggttttaccccggaagagtggggactgctggacctcaaacagaagtccctgtacagggaagtgatgctggagaactacaggaacctggtctcagtgggtaaggctggcctccaggtcaagaaggatctgtgctttgtagcacaaatgtagcacctctgaagtatgtgtctgcttgggctcacactgcaggggcaccagtaggaaaagggcagcttttcagtatgacttctgaatcattgcctagtccatccctccctgaataccagggagatgggtctgtcagggatgttttcagctgcagtagtggatgcttattgttcttgcaacaagagttccggccaggcatggtggctcactttaggagactgaagcaggaggattgcttgagcccaggagtttgagaccagcatgggcaacatagaccgtgtctctattaaaaaaaaaaaaaaaaagaaactccacagaaattccagacaatgcgatgccagtgtcccaacagcttaggagtagcatcaaagagcctgtccctgccaggcacggtagcttacgcctgtaatcctggcactttgggaggctgaggcaggcagatcagttgaggtcaggagttctagaccaacctgaccaacatgatgaaaccctgtctttactaaaaatacaaaaattagccgagcaccccagctactcaggaggctgagccaggagaactgcttgaacatgggaggtggaggagattgcagtgagctgagatcagatcacagcactccagcttgggcaactgagcaagactccgtctcaaaaaaaaaaaaaaaaagcctgtcccttcaaactctggttattgtgaacctttccatgttccccctagtcattgcacagctgtggctccaagcattgcatctgtgttcaaggcagaaacaaggagaaggggtagccctttcacagctgtcatgtttaaccagaaagcaaaagctttcccagctgaccgatctccctttgtgtctggctgaccagaactggaccccttagctgcttggcaaaggagtctaggaaagccaacaacagggatggatggagttgtgttcactgctctaggccagaagtcatgtgccttagcaggggagaagctggagacggcttgtgctgcagtaggatagcattttctcctgaacacagacccccacaagccctgtctcttttcctttgagcagaacatcagctttccaaaccagatgtggtatctcagttagaggaggcagaagatttctggccagtggagagaggaattcctcaagacaccattccaggtgagaaccagacatgggaagcccccacagggaaggggccaactgatgagtcagggaccagtatcttggaaaagcagtagacattgggataccccaggtgggatgctgtgatgagcagttgcagaaccaaactcgaagtttttctctggctccacagtcagcagtgtcctacttggttgaaagtgaacctgttgctggtggcaggtgatacttgtgttgacagtaggggctcccttagtctgttacacgcattgtctactgccctcccctcataatcactggtaaccctggtgtgtatttccagccagactttcttatataggcttacgtgaatgtatgtgaatatatatacacattttgggggtgttataatacagacaagtcagcttctttttgttttggagacagggtctctgtcaccgaggctggagtgcagtggcatgatctcagctcactgcaccctccgcgtcctggactcaagctgtcctccgacctcagccttccaggtagctggatctataggcatgtaccaccatgcccgtttaattgtttttttgtagagacagtgtttcaccatgttgcccaggctggtcttgaactcctgagctcaagtgatccatccacctcagcctcccagagtgctgggattccaggcatgagccaccgtgtctgtctggtctgctttattttatttattttttgagatggaatctcactctgttgctcaggctggagtgcagtggtgtgatctcagctccctgcaacctccgcctcctgggttcaagtgattttccagcctcagcctctgcagtagctgggattacaggtgtgcaccatgactccaggctagtttttgtatttttagtaacggacggtttcaccatgttggccatgctgttcttgaactcctgacttcaagtgattcacccaccttggcctcacaaagtgctgggattacaggcatgagccattgtgcccgacctctgctttattcttaacagcttcagtgtggtccacatttgatttttcttcttttggtggacattaaatttactgcagaaaacttccttgcatactttttttttgcacgaacaagttggtttttctgtaggttggatttctaaatatggaactacaagatcagccaatgttgtaaactaaaaatctggtagtgacaaattgccatctcaaatcctttaaggccaggcacagtggctcacacctgtaatcccagcactttgggaggctgaggtgggaggttgtttgagaccctgtctctataaagaaaataaaataggacaggcacggtggctcatggctgtaatcccagcactttgggaggccaaggcaggcagatcatttgaagtcgggagtttgagaccagcctggccaaaatggtgaaaccccatctctactaaaaatacaaaaattagctgggcatggtgggtgcctgtaatcccagctacttgggaggctgaggcaggagaattgcttaaacccaggagatggaggttgcagtgagcagagatcatgccactgcgtgacagagtgagactccatctcaaaaaaaaaaaaaaaatatatatatatatatatatatatatgtaaaaaatagatgtgtgtgtgtgtgtgtgtatatatatatgtatatgtatatatatatatatatatatatatatataaatctttaaaaataggccaggcaccaggggctcatgcctataatcccagcaatttgggagtccaaggcagtaggattgcttgaggctaggagtttgaggttatagtaagctgtgatcatgccactgcactctaacctggttgacagtgagaccctgtctcaaaaaaaaaaaattaaaaatccttcagcctacgtagagttggctgaagtaaatgacaactctttttcttctttatcaacagcaatttgtaatggtctttttaaggtttgcagatctgatgggataaatacaatatgttcaatttagttcacattttccgcacaacggaccaagttggacatattttataaatctatggcctgtttgtattttttcttttgtgagttcatatattttctcatttttttcttgtttgtgggaattctctatgttctggatgttaatattgaaatatcatatcccagaccatatattgtctacctttatgtagtctctatacagaagttttataatttctttttcttttcaaatatgtctttgtttctgttttagattctgtatcatatataggtagattatccaaacactttagtgtgttgtggtatttgttatatacctcgaactgctgcgctcaagcagtcctcctgactcagactcccaaagtgctgggatcacagcacttaaatttttttctttttagttcagtttatctggaatttcgttttatatatgggtggggttcatcctctgcttattggaaatatcatatttgtcatgggctaaatagctgtctttatatactggcctctatgggctctcccttgatcttttctgtctctgagtaaatgccatgttactgtactttgatatatagtagttccccttgtcatttaaaaaaaagaaaaagtcttagctggctttagcgatctatttctccagatgaacacttattctcagcttgtcagtgttcattgagaaaatcttgttgggatgtgtattacatttaattaggttttcattattactattacctgatcaggttaatcctgcctcatggtcttgcatagttgttccagatgaacctgtcatgctcttaaattctttgatcttttttggccgggcgggcacggtggctcacacctgtaatcccagcactttgggaggctgaggtgggcagatcatgaggtcaagaaatcgagaccattctggccaacatggtgaaaccctgtctctgctaaaaatacaaaaattagctgggcgtggtggttcgcacctgtaatcccagctgcttgggaggctgaggcaggaggatcacttgaacctgggaggcagaggttgcagtgaacccagactgcgccactgcactccagcctaggcgacagagcaagactctatctcaaaaaaaaaaaaaaaaatttatctctctctttttttttttttttttgagatggagtctccctctgccacccaggctgtagggcagtgcgatctcagctcactgcaacctccatcctctgggttcaagtgattctcgtgcctcagcctcctgagtagctgggactacaggcatgtgccactatgcccggccaattttttaatcatctgtaacagttgtgttacatcatgtagttgtattcatcatggatagtatatccaaaattgtgtgaagctcagagtttaaagagttggtatctagtctctgacttaaatggaaaagtttctaggttttgatgagcttaatgctagattctgctttgattcaaatcagttttatctggattaacaaatagtcatgttgtctttcctgatgaataaaaatcggtaatatcttctatttcccttctagagcatactaaagtggtcacacaattcttctcctttgagcagttaacataggagtataatagatgtagaagttttgtaacgtgctgctggagtcttgaatttttaaagggtttttgtgtcagtattcataaattatgttggggaggtggttttctttgtgtgtttgcttggtcagcttttctgtcagtgtgctgaatgctttcccttctctttgttttctgtgctgtggtgcaagtggcatcagaactgcccacttctggcagtattgagctgtgacatctgcacctaacccccatccttggtgatgacctgtttgccacagaatagagggctagagtctttctctgtgactctccccaacccccaacctttctgggggccctgtttctgatttcttcgtatttcagcttcctggctcagcattagtattttggtttttgtttccacattcaaagtttttccttccattcccttcactgaaaatctttgttagcaaaagaggtcactaaactatttcatctgcaaagtctccagcaatgcaagtactttgtatctgcctgcagtggtttctgtgccccttggtttttgagacagagtctcactctatcgccaggctggagtgcagtggtgccatctcagctcactgtaacctctgcctcccaggttcaagtgattctcctgcctcagcctccagagtagctgggactacaggtgcacaccaccacgctcagctaattttttgtatttttagtagagactgggtttcaccatgttggccaggatggtcttgatcttttgaacttgtgatctgcccacctcggcctcccaaagtgctggtattataggcgtgagccactgcccccggcccagcctcctgatcttccttttggtctttatgtctctggattactcaggctgtgacaagtctgcgtttcatccttcttggagctgaggactcatgtcctgaatgggcaaacctccaggccatacacttctggatgatctggtagtatcctaaatctggctgatgtctggggcactgtgggtgccacacatcttgggagagctgactccacaggtgacagattcagggtggtgtcccagagtcagaggccacatgaggggaggctcatcaggaggtactgttgcagtctcagcctgaggtgatgggtgtccaactcatctctgctctgtcacagaaagagtccttaattagatgctgtccttcctcttctccttcttccacctcacagatacttatggagggccttttctgtcccatgcaatatacttactaaaaacttcggtgataaaccaaagcacttacataatctctaccatcttagacttcatagtctaaacaatgatggccttttacaaacatgttacacagatacagtgataaatgtactgagaaggaaaaaagcctgatataaagaaggggagcagtggggaattacttcagaagacctagtcaggggacactgcaggggtgagattttagccaattcctgaaggaaaataagtccgtggacatataggattggtggtgaagacagcttctaggcatggaggcaccatttgaggtgactgtcagatgggaaagaacttagcatttcgagggccacttcgagcctagtggactaggagtaggtaaaatgaagggatgtgacattgcttttcacagctcactctgggtggctgtgaagaaagaattgtggtatgtcacagattggaggcaggcagggcccgcagttatacttggtaatacctgctaacatgtggtaataagtggcctgagagtaacagcacatttggggaaaatcaggtgtgtgtgattcataggtggactcagtggacctaggtgagtgattgagagggatgaaagaacaagccatcaagaatttctcgtaggtgactgcgtctaacatatttcatacgtaaagtcggacctcctgcacataacaaaatccacagatgctcaagtgcccaatataaaatggtgtagtgtttgcatatgacttactcacatcctcccatatagctgaagtcatctctagattacttataataccgaatatgatgtaaatgctgtgtaagtagttgttacactgtttagggaatggtgacgaggaaaaaaagtttgcacatgttcagtacatttgcagccatcttttatatatttttttgagttgaggtctcactctatgtatcacccaggctgacgtgtagtggcatgatcatggctcactgcagccttgaactcctgggctcaagtgatcctcctgcctcagcttcgtgagtagcttggactacatgtgtgcgccattacgcctggctaagttttatatttttttgtcaccatgttgcccaggctggtatcgagcttgcctcaagcaatcctccccgcgtcagtttcccaaagtgctgagattaccgtctttagctaccatgtttggcacatcattcatttttttttttccctcaaatattttcaatccagagtttgttgaatccacagatgtggaacccacagaatatacaggtccaactgtacattctttttgtcactatcttttttctttttttttttttgagacacagtctcgctctgttgcccaggttggagtgcagtggcacaatctcggctcactgcaagctccacctcctgggttcacgccattctcctgcctcagcctcccgagtagctgggactacaggcgcccgccaccacgcccagctaaatttttgtatttttagtagagacagggtttcaccgtgttagccaggatggtttcgatctcctgacctcatgatctgcctgccttggcctcccaaagtgctgggattacaggtgtgagccaccgcgcctggcctttttttttttttttttttttttttggagagtctcgctctgtcatccaggcttctgtagtgcagtggtgcaatctcggctcattgcaacctctgcctcctgggttcaagtgattctcctacctcagcctcctgagaagctgggactacaggactgtgcctgtatgtgtccatcgcttcttttaaaaatatgataaagggaccaggtgtgatggcttatgactggaaccccaacacttagggaggctaaggtgggaggatcacttgaactaaggagttcaagaccacctgacaaacacagcaaaacgtcatctctactaaaaataaaaataataagccagatgcagtgctgcatccctgtagtcccagctacttgggaggctgaggcaggaggattgcttgagcttgggagtttgaggctgcattgagctgtgattgtaccactgcacttcagcctgggcaacacagcaagaaacggtctcaaaaaaatatatctatatctatatctatatatctatatcacatatgagataaaagggtcagatgtggtggctcacacctgtaatcccaacactttgggatgccaaagcaggaggattgcttgaggccagatgtttgagatcagcttgggaaacatggtgaatacaagtctctgcaaaaaaataacaaaaattagctgggtgtggaggcaggaggatcacttcagcctgggaggttgagattgcagtgcaccactgcactccagcctttgtttcaaaaatatgtgtgtgtgtgggtgtgtgtgtgtgtatgataagggagaacaattatttctgagtttttggcattagccaaggatgtggggatgtctggtaaagacctagactttgctgaggggaggaaataaggggtttgtgttttctgtgttttttgtgttttgttttttacctttttttttttttttttttttttttgaggcaggctctcactttgtcacccaggctaaagtgcagtggccccatctcacatcactgcaacctccacctcccaggttcaggcaattctcctgcctcagccttctgtgtagctgggactacaggcacctgccaccacacctagctgatattttggactttttagtagagacagggtttcaccatgttggccaggctggtctcaaatccctgacctgaagtgatcctcccacctgggcctcccaaagtgctgggattacaggtgtgagccaccacacctggtctgttttttactttttgtgttgaaataatttttaatctttttcttcggccgggcgcggtggctgatgtctataatgccagcactttgggaggccaaggcgggtggatcacctgagaagttcgagaccatcctggctaacacggaaaccccatctctactaaaaatacaaaaaatagccgggcacggtggcgggcgccagtagtcccagctactcaggaggctgaggcaggagaatggcatgaagccgggaggcggagcttgcagtgagctgaaatagcacctctgcactccagcctgggcgacagagtgagactccatgtcaaaaaataataataataataaataaataaataaataaaaatacaaaaattaactgggcatgctggtgtgcacctgtagtcccagctactcgggaggctgaggcaggtgaatcgattgaacccaggaggtggaggttacagtgagccgagatggtgccactgcactccagcctggcgacagagtgagactctgtctcaaaaaaaaaaaaatacacatatatgtgtgtgtatatatgtgtgtgtatatatatacacactaatagtatggataactcaatagctttcacattgattgaagtttttgaattgtcccatgtcttaactgattcttgtaatgacagatgaatgagaaggcaccatagagacactcaagggtttgcaaatccagtcgaatacacctatttagacctaagaaggagatccacacagcacataaaaacatccgtgtggaagtcataggtgtttagaatggaatgctttactgtgagtgtgagacggggaactgtcttctaaagtggtcagtttctcccaacagtggcatagctgtgcatctcattaatggacagaactggtattgagtttagacttgggccattttgacaactctgtgtgcttctcgagcttcccatgatagcaagaatggcagtcaagtcagcagtccccaacctttttggcactagggaccggttttgtggaagacagtttttccgtggaccttggggtggggagggatagttttgagatgaaactgttccaccccagatcatgaggcattagattctcataaggaacatgcagcctagatccctcatgcacagtttacaatagggttcatgctcctgtgagagtccagtgccactgcggatctgacaggaggtggagctcagatggtaatgctcatttgcctgccgctcacctcctgccgtgcagcctggtaccagtttatggcctggcagctggggacccctggtttaagtagaagggaaacaaatgctaggacaaatggcattcatcctcaggaaagcactgaatgaggaatgatgctgtgacagtaagcaatgtagggaaaataggtggcactcgaatcttcagctctcactaatgtcccttcaagaaccattgccatatatgtggctcttgggtggaatacttgagatgtaaactattacagatttagtcattaggaaaggaatgcagggaagagactattatgaaggtcatgatttaggaaaccctgcagggcattttacattttttacttgtcaagaagttaagtagaggccaggcacggcggctcatgcctgtaattgcagcactttgagaggccaaggtgggcagatcatttgagctcaggggtttgagaccaacctgggcaacatgacgaaaccctattgctacataaaatagaaaaaattagccacacatggtggcgtgtgtctatagttccagctacttgggaggctgaggtgggaggttggcttgagcctggaaggtggaggttgcagtgagctgggatcctgccactgcagaaaaaaaaacaaagttaagtaggaaatgagtcctacaaataagaacttagcagcttttttgaaacatagaccaaacatgagtctgaaaaataagtttgatgaggtgagtgttttattgggaggaagaaagccaaattcttcttgagattccatcctttgtatagcttgagagggtcacataggctatagagtgatcaacagcataccattcttttatccaagaataagatggagtaaatgtgtttagtttgaaaaaattcactttcagcctgtctttgccctctttaatgtttttgccctctttaatgtctttgccatctttcacgggacattaaccagcaaacaccccaaatgaagtaagtccttttcatgaacttttcaccatctgagaactcacacagggaagaaacctcagaaatatgatcacgtgaggaaagacttctggcctaactcagtcttatcttgagaggattcatactggaaaagttcttacattgagtattacatctaagagcttctgaaaccatgagaatataattgctgtgggaaaggttttatgcatagctcccttattcagcatcacagaagttgtactagagattacctgagaacatagggctgggaagccttcgggtgtcccagaactcactggcaaggatccctctctgaacacagcattttgggaaccccttcagtaggagtcctcattgttttcagcatcagaggactcatatgggcaaacatcctgtgaatgaaatctgtgcagacaaatgaccagccttaactctcaccttatgtgacagaacgaaaaaaatatacactgaaaagaaccccgttgaataataaaaatgaaatgtctcatcctatttttatatcatgtcgtagagaaggcaaaccctacataaaacactgataagtatataaatgtagtcttgtctcttctaatttgcttattatctgacctgaacatctagaacaaatatttaaaatatggatgagagcaggtgttcttttacttctgtatgtccccatttgctaacacaatgactgaattactaggaactcagtacataacgttgagtgaatagatgtctgaagaagttgcaggagacaagaatatgtcttcaaagagaagactgaatacaaggccaggctttgaaacaaaagggtaggtaagagagggtaaaggaaaatcttgagagagtgctacaaagaactctgcggggcccacattcttggcaactaggttgagtctggaatgttgggtggctgtcaaacatgttttggctggaattcagtgaagcagagtcatttcatgctttgtgatcttttattgaagaacactttacattctctgccacctcccacatatctgatctctaagacctgtgtaaatcgtgatcctcttatctggggatcactctccctgtgttctagggcttgtactcagggataacttcaaagtctgaaatgtcttaagtagtaattaagaaggaaaacaaacgaactaagtgtttgaagcagacatttttggggggaaagaaaaataccatcaacagtcctatagaaagaggaacaatggctttaagaaaaaaaaagaagaataaatgagtcagaaatagagaagaaaaaaatattccaagagctcattttctggataggcagaatgccaaaatgactttgagtaagtaaagaataaataaccaaccagtaaacctatacaggggaaaagaacctgtacagatattttacatgtagtttttagttacagtagtttgcacagctgttacaaagaatgagcaacctctttatgtattgatttgaaaccacatgtgtgtacttaaagtatatgacattttaatatataaatatacataaactatttcttaaaatttaagtgtgcttgctttggcttcacatatactaaaattggaacagtacagaagatgagcataaaaatttaaaaataacaaaatacatagtcaagtgcgaacacacaaacatggttgtgtgtcagttgatcatcagtggaaagacatggagacttctttggaattttatattaattttcggaggtgctgcccataactgtgatcatatggaaatggtagctccttcctgttgtgtcactgcttcctggtccagttcctgacacagtataggtgctcagtaattatttgttgagtgtaggaatgaacaaacaaaacatggaaagatttttggaaaagtgtagagttgccaaaattagtcctaggagaaatattaaaattaactttgacttttttttttttttttttttagaacaaattgaccacttgcatctgagtactgccctgagcagtggagattttttaacttcccattaaagacagggatgggtgcagtggctcacccatctcagcaccttgggagggtgaagtgggagaattgctggagccaggaattggagaccaccccgggcagcatagcaattcctggtctctacaaaaaatttaaaaattagccatgtgtgctggggtgcgcacctctgaaatactattaaaatgatactatttggctgggcacggtggctcagtcctgtaatgctggcactttgggaggccgaggcaggtggatcacctgaggtcaggagtttgagaccagcctggcaaacatgtcaaaaccctgtctctactaaaactacaaaaaatagccaggtgtggtggtgggcgcctgtaatcccagctacttaggaggttgagacaggagaattgattgaacccgggaggcggaggttgcagtgagccgagattgtgccactacacttcagcctgggcgacagagcaagactctgtctaaaaaaaaaaagattcagcaaaatgacattacaaaataaattcatagtaatagcttggcttggccaggtatggtggctcacacctgtactggagtggctcaatcccgatactttgggaggccaaggtgaatggatcacttgaggccaggagttcaagaccagcctggccaacatggtgaaactctgtctctactaaaaatacaaaaacttagccgggcgtggtggcgtgcacctgtaattcgggaggctgaggcatgagaattgcttgaactcaggagttggatgttgccatgagcagagatcgcactactgcagtccagcctggcttatggtgcgagattccatctcaaaaagaaagaaaaagctttggtttacaccaggaatatcaaatttgacatggatatacaaaatacattaatacctttaaaaagttataccaaagaataaattattaaagaatgagcaggacctatttgaagaaagttgtaagtgctggagtgtggaagacttgataaatagaagtattaacttattttgagggcttaaaaaggctagaagtactgatgtccttttcctgagtcctgaagtcattctagccatcaacctctggagaaatgctgctggggccattttaccatgggaccagaaatacaagtccctgacatgggcttggctgagaagaagcaagtggggtgcaaactatgtgtgctttcatgttgcaaagaagctgtgttgaatcaacaaatattacttgagcacttgccaggattccaggtactgttccagggctggatcacagtgatgagtggggcaggtcttacacctgctttcattgggcctacatccattccatggctgattggatcaacaaaaatgaagttgcccattcagtacctcaattgcactgggcacctttcaactgctcattggccctgcagctaatgctactatgttggacagtacagatctagaacatctcatttatagaaagttccattggacagcactgctctagatagggtgatagacatgataaattaatgaatcagatatttgggatggtaatgagtgttggaaagagaaggaaacaatgggatacattggtgggggacaagcgaggtacgggtgggcagcagtagttcagaactaagtaggaagatggttctgaggaggtgacgtttgagctcagacctgaatgggaaaggcgaaccaggtgaagatgttggggaaggtgaaccaggcgaagatgttggggaagactataccaggcaggagggtggtgcacatgtggatctctggatgaaaggccatattctaggaaaactaagatggtggctgtgggagacccctttagcgtcaaggacatgaaataacagggtttggaacccggctcctttgttgcccactatgttaggccgttcttaaattgctgtaaatacctgagactgggttatttatgaagataagagatttaattggctcacagttctgcaggctgtacaagggtggcactggcatctggttggcttctggggaggcctcagggagctttttactcatggtggaaggcagggagcaggcacatcatgggaaaagcagcagccagagagaggaagaaggtgccgcatactgttgtttgtttgttttgtttttttttttggagacacggtctcactctcacctaggcggtagtacagtggtgcgatcatgacccactgcagcctcgacttcctgagttcaagcgattctcccacctcagcttcctgagtagccaggactacaggcacatgccgctacgcctggctaatttttttttttttttttttttgtggagatggggttttgccatgttgcccaggccggtctagaactcctgggctcaagcgaaccacctacctcagcctcccaaggtgctgggattacaggcgtgagccattctgcccggccacacttttttaaacaaccagatctcgtgtgattaacttaaccaccaggaggatggtgctaagccattcttgaaggttcaccaggccccacctccaacacagcatcacttttcaacctgagatttggtagggacacagaaccaaaccggatcatccactctgcaaccctgggcagggttcctagcctatcccagcatgaatttcttttttttttttttctttctgagatggagtcttgcactgtcgcccaggctggagtgcagtggtgtgatcttagctcactgtaacctccacctcctgggttcaagtgattctcctgcctcagcctcccaggtagctgggactacaggtgcccgccacctcgcctagctaacttttgtgtttttagtagagacggggtttcaccatattggccaggctggtctcaaactcctgaccttgtgatctgcccacctcggcctcccaaagtgctgggattacaggcatgagtcaccgcaccaggcatatttcttttgtgtatggtgtacatttgcttcctgggactgtgggcagccttcgtgaaatgatggtactgtcattgattcaaaaactgagtaacgtaaagatgatcagcagcctttggcagatcctctacttaggggtgtgagatccacaagtcccagttggcagcctcagtggtacactggaggagacagatgcagaaggtaatccaacagggagcttaggggcactgagggaatgatgagagagaacaggagagctgagagctttccagacaaggaggaaaagtgatggggtactgtgcccagggattaggggagctgagggtaagtactcttctgacttttcccccacaagctgctaaaaagatcattgcttttcgttatattttggactggtatacctggctaatcagcattcactggcaaacagcactgtgaggaagacagctgcctaaggcctgtttgtcaccctggaagggaagcagcagagaggtagaagtatcctgagagaagaaaatagtgtcaagagggagaaagcagcagctcccatcaagcccttaccacatgctgtgcctggactttggtatctcatcactttgggtgaagaaactcaggctcaagaagttaatctctcttgattaaaccccttgctttgagcctcagtgaatttgtttcacaacccattagacagacagttgtaggtgaggtgactacattgctacgggctcattcagttgctggactgaaagccatttggagctccagctgatagggattatgcagctccacatgagtgggttgggtcagtcatgtctgtggaatgagatgggtggaatgagaatccagttccacctctgcctggtggtgaacttaagagcttccattttctcctccatgaagtggagcagctaatttcctgcaatagacagtggtaaggattgccctaaaggtcttgggatagtctatgggttgacatttggaggactgaggtgcacagaatgagtccatcacttcctcaccagtttctgggtttgtggtctctctgttcactgtggtgtccttggttccacagcatgcaaaaggtgctttatgataactgtgtacagaacagagtgtggggcctcatgggttaataataaagattaaagcagaagtaagtacattagaaaggggtggggtggagtagaagaatccaacagttgttttcctaggggccaaggcatgaaaatccctcgattaaggaatacaaaaatgaaattttagaaatttatgaagtaacgtttaagatgtttaagtgtcatgcatggttacctaaaatagtactggtggcccagtgctggtctgccacttagcccccccccaggaagtacagattcagttggtgcatgtcccatgtcctaggcacttagtccggtgctgctgggcctccagtaaatcttatccccagctgcttctcaggaaaaattcaagccttaagagctgtaattgggctgggcacggtggctcacacctgtaatcccagcactttgggaggccgagatggacggatcacctgaggtgaggagttcgagaccagcctggccaagatggcgaaaccctgtctctactaaaaatacaaaaattagctgggcctggcggtgggcgcctgtaatcccagctgcggctgaggcaggagaattgcttgaacccgggaggcggaggttgcagtgagccgagatccctccactgcactctagcgtgggcgactaagagcgaaactccgtctcaaaaaaaaaaaaaaaaagaaaaaaacgctgtaattgaaagaaaataaatgaagtatgctttcaaattaagaaaagttacttggggcgaagtaagtccccagaagtcctaagaaacagaaagggaattaaatacagatcagagcacttataaatgagttggagaggccaagcccccaaaatgaaaatacctcaaaagcttatttgggggaagaggttggaattaggtgcacaagtgtgtctgattaatcttatcaagaagaaaaatcacttcaagcgtagactggtaatggtcgaaaatttaaagcgtggctcaggtcgtgatctacaattgcgccacctcgctggaaggacggcctgggctgcgagaaggcagcgcgggcactggctctgggcagatcccagcgcggagctgactccctgggcccgtgccagcggtgggcacctccagccaaacctgtgcagcgcgcaaacgggaagcccagacagaccagggtttgtactcgaggaacgggagaggggaggggttgggagccgtctgctgtggcctcagcggaacgtctaccccagcccgcgaggtccggagaaataccttcaggtggggcaggcgtggaaactcctgccgcactgccccgttgccccatgtaggcccaggacgtgtccctgtcagcggggactagggagaacggtaccggaagcccgtgtctcggaggctgctgggagctgtaggccccgcgggtgtcgtagttctgggcgcttttccgggtccagggggggcagggttcgaggcgtggcctagaggcgttgtaggcgtcgacccatttcgtcggctgagagactgggtcttgtgtggacggtgctattctgggcgaaagggttagcttatggttgtggcctcgcattcctgagtgcgcgatgacggactcggcgggtgcgtgagagaccagggccgaggaggggtctgtgcaggcggcttccgggctctgaaagatgcttccgcccgagcttttttatttttaacgtagctgcagctattgcacactagtaattttctgctctgcgaccgtttttctgcgctgtaataatcacgctaaaagtagtgcaggttttactgcttacaagggagtttttaacaattttcttaaactgtgttacaacactacccgttcttccagttttgtcctaacaccgcgcggggcaggaatattccaggtatgttgtggaaataaagaccaggccgtccagatgaggacacccagaggttgactcagagccgggtatagtagggagccagccacggtcccttgtgttctgtagagagagtcaaaggcaggtagggagtgagaagacgtgcattcataaggaagggttctgagtggagaaccctattggcttggcggggagcagtaaaagggtatattggcagtcatctaagtcctgagctgtgcttgttgccagaggttgtgggtcagtgctgtgttaactatatttggtttggctgttgtgtttttattcattcctttggtgcctctatacctatcttcatctccgaatagctccagtagattcatcccgtgaaagtagctgtggttccttgctgtggctttgctagttcatgctgagctacttcctggtagaattgtgctgaccatttatattcacaacagcaagggtgaaattgcaggtttgctcttgtcgttgccactaaatattacaaatatcaaaagtaagtcataatctgtagttatttatacttttatatttgtttttaaggccttattttttagggacaatatcaggcttggtagccaaggctggagtgcagtggtgcaatcatagataactgtaaaatcaaattattgggcccaagcagccctcctgcctccaagtagctaggaccacaggtgtatgccatcacacctgattaatttaaacttttttagagacagggtctcactatgttgcccaggctggtctcaagctcctggcgtgaagcgaatctcctgcctcagcctcccaaagtgcagggatcacaggtgtgagccaccccgctggccaaattatttagaattagcattttgaaggggagttttagagagctttcttgtttcctcttgttttgtgctgcctcctcagcatttcaggacagtcctggagttcagtttagcaatgtgctcttgtggactctgtgccaggacccagagcccctgcctttcccatatatcctcgttcttgtccccagtggaggttggagaaggttctttttcctgtgaccatgcatacatgtacagtgtcacagatcccttctcaaccctcattgccttttgttctttccctataacagctctatggagatataattcacacattgtaaagttcactcttgtaaagtgtacagttcagtgtttttaaatatattcacagggttgtacagctgtcactactgtctaattccagaacattttcttcacccaagaaagaaaccgcatacccattagcagtctcccaccaatcctctcaatttctccatttcctaacaattactaatctacttgtctgtctgtggatttttatattctggacatttcatataatatgtggccttttgtgtctggcttcttttacttagcatgatgttttcaagtttcacctgtgttgtagcatatattagtagtacttcattcctttttattgccaatatttcattatatgactagatcacaatttgcttatacatccctcagttgatagacaatgggttatttgtacttgttggctattatggataacactttggtgaacattcttatagaagtttttggggacatatgctttcaattttcttagctatatatacttggggggaatgtctgggtcatggataactatgtgtttaacttctgaggatttaccaacctgttttgcagagtggtacagcattttatgttcccaccaacagtgtgtgagcattctagtttttccacatcctctcctgttatcatctgtctttggtaacagccatgctagtgggtttgaagcatattccactgtggttttgacttgcatttccctagtgaataatggcgttgagcatcttttcatgtgcttgttctcatttgtcttgctctgcttttgacttacagagtatcctgagctccagctggaccctaaattggatcctcttcctgctgagagtcccctaatgaacattgaggttgttgaggtcctcacactgaaccaggaggtggctggtccccggaatgcccagatccaggccctatatgctgaagatggaagcctgagtgcagatgcccccagtgagcaggtccaacagcagggcaagcatccaggtgaccctgaggccgcgcgccagaggttccggcagttccgttataaggacatgacaggtccccgggaggccctggaccagctccgagagctgtgtcaccagtggctacagcctaaggcacgctccaaggagcagatcctggagctgctggtgctggagcagttcctaggtgcactgcctgtgaagctccggacatgggtggaatcgcagcacccagagaactgccaagaggtggtggccctggtagagggtgtgacctggatgtctgaggaggaaggtaagtagaagggtgggtagagggacagcttaatgagggtgtcttggagtaccctgtgggggagataagaactccaggcttcctaggaaggtcatgggaaggattgtgtccgctccatacagaccaaggacatccatgttgcccacgtgttcctgagtcagagccactgaaacccttgcattctttagcccttcgtgggcttctgatggaagcacacagatgaagtgcttcatttttatccctctggcatccctgctgcaccataagccctgtagcacttgataagatagatgggaatactgagctcagagagcccgcagtagcaggagagacagggatttgacaaatgagaatgcatagaaaaatgctgggactatgaggagctcgaggtgatggtgaggcttatgaaggtctgcagctgacacctggtgtggagtggaacttggccagggtaaagaaagggggcaggaaagatgtgccatgcagaggggagcactgcctgtaagggccaagatggaagggatcacagtaaatgcaaaactcagaaaaatcggttatgtttgtgatggaagggagcagaggttggagctggcactgccagtggggactttagtcctaaagcaaagcaaaatgttcttctaaaacagtagggctcgatccctgagttccagaaactggtggcaccactggatttgacctttagagatttaccaggctgcatgtgtggtggatggtggacagaggatgggggcgaggctggacacaggctacccgcagctattgccatgccctctgatggggtggtgtcttggataggagtgatggtgatgtctgactggggagagactacacgtgtggagtgtgtatttgggaataagactgcaagacttggtttcttcatcaggctgagtttcacagagcgtgcatgcttctgcattgctcacctccattttccacatttcacgggtgcccagaagatgtttctgatgtgaacgaatgattgactggttgatgtttgtgattgcaggaaaggggaaggtatcctgcagggggatggtgggattctaagaggccagggcatcctggagatcgggtatccgaggcagcagggcaggcacttgcatgagttgtgtcagatgcaccaagtctggggtgctgtacttggcagaataattgccccaaaggtgtccatgtcctgactcctggaccctgtgaataagttgcctcacatgacaaaggggactttgcagaaacaattaaggatcttgagagggagagatgcactggattatttgagtggatctaacataaccacaggggcccttaggagagggaggctggagggtcagaggagatgtaatgataggagcagctgatagaggaagaagccataagccaaatgtttggggcagcctctagaagctggaaaaggcaaggaatggattctcccttggagcctccaaaaggaacatagccatgctgacaccttcattttagcccagtgaggcacaaaccagacttctcatctccagaaccataaggtaatacatttgcattaatctgagccgctggcattgtggcaattcactataacagcaataggaaactagttagttaggtgccaaggagacagttgtggggttaatgaggtgaaagtcagtgaattcaccctgtgtttaacctcaggggtgaataaaataaattagtgccacagaagacaatgggaagaggctttccagagaaccctgagaatctcacattatgtgatcagtgtgttagttgggacgcttgagtgtgactgctgcaaagccttgcacagaatggctcaagggagaaggagaatttattggaaaagttccagggtgctcgagcatcaggcagggctggacccaggagctccaatagtgtcctccagacttgtcctgtccctcattcttacctcttctgccctccactggcttcatcatgggcaggctgtctccctgcatgggatttctctttcccaaatgttccaactaaggccttgttggctccaatcatctggctataggctgtgttcatcccagatctaatcactgtggccaagagaaagggatggtccagtgtgccagcctaagtcatcttgtggcccaccttgatggtgggggtagattagcattgtggaagcctgtggaccatttggggtcatgtgaggaaggttagaatgaaggagccgtggttacaggggcccttgggccaggtggagctgttgttttcttaggtggaggagacttggtgacgttcacctcaagatggctgcatttcatgggtccagggaaagtctcaccttccatgaggtgggaggagagagggaagaaggaagaggtgcccaaataggcagggtgcagggcttggaggccggaaacaggggctttgactctaaggagggggcgtcagtcagctgcctcacaggaggggctggggccctcagcagcccccggaaagggaaggagtgggaccagagtctcagcagtgaggacactggtgccctgtgacccttggagggtgagccatcccgggcccatccaggtgtgggcactcgggcacgtgctgtgaggggagcagagctggtgggaagggaggacaggagcagaggctgtcatggagccacagtacgatgcaggggtgcggtggccccatgggttgcagagaggccacccttgccctgcctaagggtccccacacctgctgacctcctctggctggtgtctcctcccagtacttcctgcaggacaacctgccgagggcaccacctgctgcctcgaggtcactgcccagcaggaggagaagcaggaggatgcagccatctgcccagtgacagtgctccctgaggtaagcggggagtatcaccctgttttggtcacagcatctcctgtgaggcaggcccacccctgaggcatccactctgccctgggctttcctaagacctcccacaggctgggacattctgagattctgagctcttaggtctgtgctgaagcaatctgagtatgaagagcagccctgccctccagccactgtggcatcactggagacaacgcatggtgacccgggagctgagaaagcaggaggcaagagggaagggactaagtgtttacagagacttgagaggtggaactaccacaggcaggcacatctgtatccaggtcagaacaagagagccctcaaccttcagaaatgcatacttaggtatttatctttggtatctgggatttgcttcagaataacccagagctggggtgtgggtgaaaaagattggtcctgatgcgctgaccactggggtagtggtatgtatgtgtcattggtcagacctgtttgcactgcaaatggcttatactggctcaagcgtagaagtcaatttattggctctcatgtattctctggtaggcttcaggcaaggctgcatccaggtgctcccaggtgatgggaagaatctctggccaacctgtttcatggctctgctttctcccctttcttcttctttttttttgagatggagtttcactcttgttgcccaggctggagtgcaatggcgcgatctcagctcactgcaacctctgcctcccaggttcaagtgattctcctgtctcagcctcctgagtagctgggattacagacagctgccactacacccggctaatttttggtatttttaatagagacggggtttcaccatgttggccaggctggtctcgaactcctgacctcaggtgatccacccgccttggcctcccaatgtgctgggattataggtgtgagccactgcgcgtggccactcccctttcttcttaggcagattctgccccatgtaagcaaaatgcctcagatcctggcaaagcagcgttgggggtacctcttcttcccaaagtcctggtcagttccccagaaaggaccagtcatggctgtgccagggtgactgccctcccccaggtcagccctgtcgacaaaggcaggggcttggttgtcatttccaccaagtgggaagacagtattaatagatggagaaccctctgcagtgggaagatttcagcaatgggcaagctggatagagccgtggttaggatggagttgtttgcttgttgcacttggagctctttatgaagcaagggctctgcctcccagcctgagacccagaccctggtttggacccagtagaactcttgtgggccctgggttggtgtctctgagcaaatccccaaagcaggagagtccctagcaccgtgagctctgtcagaacctcccagctggcctttcttctgccctcattgacaaccctctgaccctcttgctgagcatagacacatatgtgatgttacaggagccagtgaccttccaggatgtggctgtggacttcagccgggaggagtgggggctgctgggcccgacacagaggaccgagtaccgcgatgtgatgctggagacctttgggcacctggtctctgtgggtaaggctgtgccccctcttcacccacctcagggctggtaggccacaggagccccaagtcaggggtgttcaccttctctagactccacactgggcattccctcaaggggcccttgctgcatccagggcctgtaagtggaactgtagacctagaggggtgaggtcactgggtggccagaagcagccttaggtccggtgaaggagtgatttgctatctatctcctgagggagtatgagagaacaggaactcgaagagctcggaggacactccctgcccttcctgtcccttgttcaccaaggtcagtgctcccctccctgccgcttcattgcttttcagtctctctccaggttgcatgactctatttgggagaaaaaaaaaatcctgacttttgaacttaattatgcatttcatgctctcagacccatcccagcacatctctctatgggatccacatcttttgtttatttttttcagggtgggagactacactggaaaataaagagttagctccaaattctgacattcctgaggaagaaccagcccccagcctgaaagtacaagaatcctcaagggattgtgccttgtcctctacattagaagataccttgcagggtggggtccaggaagtccaagacacagtgttgaagcagatggagtctgctcaggaaaaagaccttcctcagaagaagcactttgacaaccgtgagtcccaggcaaacagtggtgctcttgacacaaaccaagtttcgctccagaaaattgacaaccctgagtcccaggcaaacagtggcgctcttgacacaaaccaagttttgctccacaaaattcctcctagaaaacgattgcgcaaacgtgactcacaagttaaaagtatgaaacataattcacgtgtaaaaattcatcagaagagctgtgaaaggcaaaaggccaaggaaggcaatggttgtaggaaaaccttcagtcggagtactaaacagattacgtttataagaattcacaaggggagccaagtttgccgatgcagtgaatgtggtaaaatattccggaacccaagatacttttctgtgcataagaaaatccataccggagagaggccctatgtgtgtcaagactgtgggaaaggatttgttcagagctcttccctcacacagcatcagagagttcattctggagagagaccatttgaatgtcaggagtgtgggaggaccttcaatgatcgctcagccatctcccagcacctgaggactcacactggcgctaagccctacaagtgtcaggactgtggaaaagccttccgccagagctcccacctcatcagacatcagaggactcacaccggggagcgcccatatgcatgcaacaaatgtggaaaggccttcacccagagctcacaccttattgggcaccagagaacccacaataggacaaagcgaaagaagaaacagcctacctcatagctctcaagccagttgaagaaaccttgccttttcagcttgaccctgcaatataacatgcacaggcctgcttgtgaatcaggactgaatgtgaaagggaagtattgagtgaggacattcccaaaaccaaaggacaactgaggagactgcccagcacataatgaataaataagaaaatgagtgaggagttattaacatcatttggaaaaaagatttcccattcacttgatattgtttgttcactcatttagtcattaaaagtgagattaataaaatctgaaaatgttatataataactttaaaaagccaggtaattaataatctgcactgatattacatccacagtaccacagtatttatgtgtatgaattaaggattaaaagataatgtggataaataaactattgatctatgtctgtgtagaacctgtgtatttcctgcctgcttaaatatctctatagtaatgattaatatttaagcaacattaaaacacaaggaaggagatcatcagatagttctagaagattctgtgcaaggctgcagcaccttgggcacaagatactatgtgagttgggatgactgaatctttctgctccttagggggttgtcatgatatggttaggtggaggtaaggaaaatttaaacccaaagggctggaaaccccaggcaagtgtggggcttcctgggaatattcatgtttcttttgttatttttcgcacagaatctcatcctgtcacccaggtttgagtgcagaggtagaatcatagcttactgtagcctcgaacacctgggctcaaaggatcacctgggctcaaagatcctcctggctcagtctttcaagtagctgggactataggcatgcaccaccatgcctagcttcatttggtttgtgtttccatttttcctgagagactatcacaaggaaggcaactgctctggccaggagcccatcactaagttaagcaaaaagacactggcaatactagagcatgtacttgcccacagttcacattctttctccaggtcacatagcccacagtatatgacccgctccattccttgttctaggctccacctttgctcttgagttccatgtaacatttaacataaaactctggatcaaaaatacttaggttcaagacactggttgagtgctactctgcatagcctctttagaacccttgggtcttgccaacaagggtgaggtgcagtcgtgccatctaggatgagagtacctcctttctctgcagaagtgaaaaacccttggagacaggaccagagtagataccttgagcccatgtgcctggagaatgatggtggtacaccagcagccctattgccattcacacattgggcacagggcttgtggttgctatgttgcttctagtcatttcagcactttaatatggcacatgttagcttctttgagaacatacacagttgaagaacttgcccagggacgttagttggtaaaaacagcctcctcagctgttcagaactctacaatatcacctctcaagaatgaaccaaagaatgggacccttgagattagaacctggtaaactaaaaattcccagattccaaatcctagactgaggggtgagtccaaagttttagtgatggcttcaggaactgagatgatggtttgagctgggtctgggaaaataagggacccaggaataggaaagggggagaacatactagggtatgggagagctgattggaactacaaagtacaaggccagtgggtccattccaaggtatggaatggctcatctcatggctggcacctgggcttgaggtggctctaaggctgagttcagttgtgttaggttctctcatccaaagagccagggttccaacagtattaggcagaaacagcatggctttttctgacccagcctaggtcacatggtgtcaccccaggacagtctatcctttacaagccagtcactaaggccagccggattcagtgggaagggggttaaactccatctcttgaagggagagtaccaaggttaagaaaggcaggagagtgtggtggccaactctggttaaaaaggtctacaagtatgccagcatttacctttaaatactgtgtatccccacctgtgcttgcaagacaggaagaggaaggcagggagagaggctgcacatgtgggagctgacccactagacacaattattagatgtagtttaaatcctggctctgctcctcactgggtctgtgattgtcagaaagaagattaatgcctggagggtccacgttccatatatccagtacaccagtgaaaaggtacatgacgctgggcacagtggctcacgcctgtaatcccagaactctgggaggatcatctgaggccaggagttagagatcagcctggggaacatggcaagatcctgtctggaaaaaaaaaaaaaaaaaaaggccaggtgtggtgatgcacctgtagtcccagctactcaggaggctgaggtaggaggaatgctcgagcctaagagtttgaggctgcagtgagctatgatagcacctctgcactccagcctgtgtgggagtgagaccttgtctcaaaaataaatttaaaaattgtaaaaagaggttacaaagatgttagcttctttgagaacacatgcagttgaggaacttgcccagggatgttggtaaaaacagcctcttcagccattcagaactctacaatatcacctctcaagaatgaaccaaagagtgggaccaattaattccagcacatccacttatttgttcaacaagagtgtctgtatcatttaccaagaaggattaaaaagtaattttgttctctttgttcctttgtggctgatttttaatgcagagactatgtatcctggatctagccagttgagcaaactctgattaattttaataggttttactaaaatctggatttccatacttttaattttatgttaatctttgcatagttttcttctgaatacaaagtaacagaagatttgattttttaaaaatctctctttccaccatcctttggtgccgtcgtcaaggtgcggatgaatatcctgtctgatgttctcaagaggatcaacaatgctgaagagaggcaaaagacagattattactaggaggtgctccaaagacattctccggtttctaattgtgatgatgaagcatggttacattggtaaatttgacatcactgatgatcacagagctggggaaattgtcgtgaacctcacaggcatgttaaacaagtgtggaatgatcagccccagatttgatgtactcaaagttctagaaaaacggcagaataatctgcttccatcctgccagtttggtttcattgtactgacttcagccggcatcatggaccacgaagcagcaagacaaaaatacacaaaagggaaaatcctgggattctttttctaggggtgtaatgcttacaaaaaaaaatgcctccgtggactacagtgcatccaaaaacaaaataactgacatttgtaccacacaaaagttaccctccaatagtgtgatctttctttcttaaggtgtaaaaccacactcggggttgtggtatttgatgctgtgcgaaattttaccttccctcgcagctcgcgagaatttgcggggccattcagcatggccagcatgggtccgagtgaggagggtccatcctcattgcacaggctacggagtggctccccgggtactttccaaggccaggtctccacctcgaagtgcgtcaaaggctgcaggccctggggaggctgaccagggcccgagggaggacgacaagcggggacgttggcggaggggttaatggcggagtcgcgatccagccgagcccacaactctgggaggctggttctgcctctctcccgaagcgtcgcccggctaagcttcgagcaccaggacacacaaccgccgactattccagagcccacagtcggcttcacgctggaggccggaaacgacacgtccccaaagcccgcgcgcgcggcccgccagaactgacctacccaatcaccgcaccgctgcgatcaagcggcgacacacgttgccgggtaagagtcacgctttggcaaataagcaacctgcctcatccaatcagcgtctcgcctgcccggttagttccttgtcttgcccaaccagattcttgcctcctccataccgctacttgcgtgtgccggtgcctggcccaatcagcgtcttgcgcctcttctcgctcccgggcctggtggaaacagactcagggccattttggctacacctgggagcagggcaccctggcggctggctgcggccgctgcagagatgaatggccccggatctgtggaggctcgcctgcccctggggaccccgtcctcggcctggggggtagtgtcaggtgtgtttgaaccagagcaattccatcttgaatagggactctctaaactaaggctaagaccggttgggctacattcccagtaagttaaggcattcttagtcacaggatgagataggaggtcggtacaagatacaggtcataaaaaccttgccgataaaacagcttgcaataaagaagccgcccaaaacccaccaaaaccaagatagcgatgagagtgacctctggtcgtcctcgctgctacactctcaccagggccatgacagttacaaatgccatggcaacgtcaggaagttaccctatatggtctaaaaaggggaggcgtgaataatccacccgatgtttagcatatcattaagaaataaccataaaaatgggcaaccagcagtcctcggggctgctctgtctatggagtagccattctttattcctttactttcctaataaacttgctttcactttatggactggacttgaattctttcttgcatgagatccacaaaccctctcttgagatctggatcgggactccctttccggtaacagtgagagcccagactggagacaggtggtcacaggctcctaggggattggggccctagggagccgttggtctgtgcaaccgccaggccccgcccgggtctcctcattaggctcaggcgcacaagcgctgagctggcctggtcctcaatcacaggtgagaagcatcccgttcccaccttgggaatggcccagcgcctgccggtcctagacgcccagcctggcctggccacggactcttggtgaagggttgggctgcgcatcactcagctgtggtagtggtgatgatggtaggggtgctgggggactcgagctgtgtcctgagcagaaacttgaaagaaatgtgagtagctctgccgggaccacgcatctctaggcacgcccggcagggggaatatcgagatgcttactacaccagtttgtgttttgccatatccaggatcctcagtcttatttgctgaataataatttttattatttacttatttactttttgataaggagtctcactctgtcgcccaggctggagtgcagtggcgccatgtcggctcgctgcaagctccgcctgccgggttcacgccattctcctgcctcagcctccggagtagctgggactacaggcgcccgccacgacgccctgctaatttttttttttttttttaagtagagacggggtttcaccgtgttagccaggatggtctggatctcctgacctcgtgatctgcccgcctcagcctcccaaagtgctgggattacaggcgtgagccaccgcgcccggcctgctgaataatttttttaaatccatgcgttaaaattcaaaatttataaactgatttaaaagggatcatttgggtcgcgccctgtgggtcaggcctgtaatcccagcactttgggaggcccagacgggtgaatcgcttgagcccaggagttcgagatcagcctgggcaacacagcaagactgcatatctgggaaaaaaaaatgctgggcatggtggcacacacctgtagtcctagctacttgggaggatcgcttgagcccaggagttggctgctgcagtaagctgtgattgtaccgctgcactccagcctggccagcagagggagaccttgtctcaaaaaaagaggggtgggggggtggggccttttggttatttacttgccaaaataaacgtgagttaaatacagttggttaaaggcccagcgcagtggctcacacctgtaattctaaaactttgggaggctgaggtgggtggatcactcgaggtcaggagttcgagaccagcctgggcaacctggagaaatccgttctctaccaaaaatacaaacattagccaggcacacctgtagtcccaactactcagaatcctgaggcaggagaatcccttgaacacaggaggcagaggttgcactgatccgagatcatgccactgcactccaggctggacaacagagtgagtgagactccatctcaaaatcatcatcattatcatcatctacaaggggaaaatggcagaagttaagacaattttgaacaggaagaacaatgtacggaatgtcttaccaaaatgaaagtgtgtattgttaagctgaagtaattaaaactgtgaccctggagcagacagagacagagcaatgcaacaaagctatgtagagatggcatttgtggcatatgataaagcagccatttttaagttatccagaaaagagggaatgttctgaaaatgtgctgggagagtatatagttgtctggaagaaaattaagtcagacctccatcataccatacagaaagttaaatttcagagggatgaaagaacatagggccaggcacagtggctcatgcctgtaatcccagcacttcgggaggctgaggcgcgggcagatcacctgaggtcaggagttcgagataagcctggccaacatggtgaaacgccatctctactaaaaatacaaagattaaccgggtgtgctggcagacgtctgtaatcacagctgctcggggggctgagacaggagaattgcttgaacccgggaggcagaggttgcagtgagccaagatcacaacactgcagtccagcctaggtgatggagcaacactctgtcttaaaaaaaaaaaaaaaagagccaagcgtggtggctcatgcctgtaaccccagcactttaggaggccaaggtgggcagatcacctgagatcaagagttcgagaccagcctggccaacatggcaaaaccccatctctactaaaagtacaaaaattagccaggcgtggtggtgggtgcctgtaatcccagctactcaggaggctgaggcaggagaattgcttgaacccgggaggcggaagttgcagtgagctgagatggagtcactgcactccagcctgggcgacaagagtgagactccgtctcaaaaaaaaaaacaaaaaaaaaatcacactcaacaatttatcaaaaggatgacagtatatttaaactcaggaatgcaagaatgcttcaggccgggcatggtggctcacacctgtaatcccagaactttgggaggccgaggcaggtggatcacgaggtcaggagatcgagaccatccttgctaacatggtgaaaccccatctctactaaaaatacaaaaaatacaaaaaattagctgggcgtggtggtgggcgcctgtagtcccagctactgaggcagcagaatggcgtgaacccggcaggcggagcttgcagtgagccaagattgcgccactgcactccagcctgggtgacagagcgagactccgtctcacaaaaaaaaaaaaaaaaaaaaaagaaaatgatttaaaagatcaaaaggaaaaataaatgcttatgacagtctgacagccaagaaaattataatcaaaataacagtcaaggaaccggccttgcttgatattaaaatgtcattataatctcaacagaatggtattatattattatttatttgtttgtttatgtatttatttttgagacggagtctcgctctgtcgcccaggctggagtgcagtggcacgatctcggctcactgcaagctctgcctcccgggttcacgccattctcctgcctcagcctcccgagtagctgggactacaggtgcccgccactatgcccagctaattttttgtatttttagtagagacggggtttcactgtgttagccaggatggtctcgatctcctgacctcgtgatccacccgcctcggcctcccaaagtgctgggattacaggagtgagccaccgtgcccggcctattgatttatttttttgacacggagtctcactccctcacccaggctggagtgcaatggcgcgatcttggctcactacaacccccgcctcccggattcaagcgattctcctgcctcagcgtccccagtagttgggattacaggcgtccgccaccactcccggctacagaatggtattattataagaattgacaaatggatgtgtggaagaaaaatgatagcttatttgaaaagtgattttgggagaattctagctttcccagtaagctgatgcctgcatcagacctcaaacaaaagtaattcctaatagactaatgatttgtatgtttttaaaattttttttatattttgagatggagtcttgctctgtcacccaggctggaatgcagtgccgagatcttggctcactgcaacctctgcctcccaggttcaagcgattctccccgctcagccccactagtagctgggattacaggcgcgtggcataatgccctggctaatttttgtatttttagtagagacagggtctcaccatgttggccaggctgttctcaaactcctgacctcaagctatccacccgccctggcttcctaaagtgctgggattacaggcttgagtcaccgcacctggccagatttgcatgttttaaaaagtgcaaaagaaaatttagaagactacataaacataaaatctgtggcttgcaatactttttaaagcaagacaaaaaactcagatctattcataaaggaagagtagacaacatactttacataaaaagaatttttttttttttcgagacaaagtcttgttctgtcacctaggctggagtgcagtggtgcaatctcggctcactgcaacctctgcctcctgagttcaaacgattctcatgcctcacccgcctgagtcgctgggattacaggcatgcaccgccaggcctggctgatgattgtatttttagtagagatggattttgccatgttggccaggctgtcttgaactggcctcaagtgattctcttgcctgagcttcccaaagtgctgagattacaagcatgagccactgcatctggcctaaaaagaattttttgtatgctaaaatagataccataaatttaaaaagagaataaactatgtattgagaaaaatatttgttacacaaatgacagacgagattaacattgataaactatcatgaacgcctataaagtgccaaaaaagaaaaaaatattaattagacaaaacacagaaaacaaaacctcaaataaccagtaagaatatgtaaagatcctgaaatcacaagtagctagggaatacaaattacacaaaatgttacttttacccaaaatactggcaaaatacaaaggataatacccaatgctggaaagaatagggactattattctcactttggaaagtaatttggtaatacctaagagaatcaaaaatacacttatccttcaacttgtgcagtcccactggaggggctctgacctatagaaatgaaggcactaattctgggtgtccgggggtgtttactacagtattgtttatgttgtgtttggaaatagagaagagtgtgggaggtgaatgctaggattttacactgaaagaggtgcagatgagggggaagaagtaggctggagcaaattgaaagtgatgtctgctataattagttaagagaaaatatgaatgtaaggttcaatgtatgaagtttttttttttctttttctttttttttttttttttttagacagtcttgccctgttgcccaggctggaatgcaatggcatgaccttggctcactgcaacctctgcctcccagattcaatcaattctcctgcctcagcctcccgagtagctgagcctcccgccaccatgcctggctaattgttgtatttttagtagagacagggtttcaccgcgttggtcaggctggtcttgaactcctgaccttgtggtctgcccacttcagcctctcaaagtgctggaattacaggcgtgagctactgagcccagccacaaggtatgaagtttttctagacatgtaaaagtgagcatgcacttgggcaaaaacgagagtcatccaaaaatgaaaacataagatttaatttcaggatgggagtctatgtcatcttctatttgaattttctgttatttcctgagttccaacttttttccactccagataattcatactataatatttccataaacctggctcacagaataaaagtttgaaaaataagtttatttcaataatcattagaaaaattatagtcgggcacggtggctcatgccggtaatcccagcactttgggaggccgaggctggcagatcacgaggtcagggattcgagaccagctgatcaacatagtgaaaccccgactctactaaaagtacaaaaattagcagggcgtggtggtgcgcgcccataatcccagctactcaggaggctgaggaaggagaattgcttgaacctgggaggcagaggttgcagtgagccaagatcgcaccactgcactccagcctgggcgacagaacgagactctgtctcaaaaaaaaaaattatggaagtgaaaaattgtgcaaaaatgagtgtgtaccaactttctgtcagagcttcaccttaatcatctaataagaaagcaaacaaaagataaactgtataagcatgccaacaataatctttatttctgccatgttttaccctttaatattcagaagaaaagtcatacaggaggaaaattttataactatagtaaatatagacaacttgaacaacactagatctctactggccaaaaggaaaaaacaaaaaacaacccccagtatatccctaaatgtacaccagagaatcttaaaagataaaataatttggccaggcacggtggctcccgcctgtaatctcagcactttgggaggccgaggtgggcggatcacgaggtcaggagatcgagaccatcctggctaacacggtgaaattccatctgtactaaaaatacaaaaacaaaattagccaggcatagtggcgggggtctgtaatcccagctactccagaggctgaagcaggagagtggcatgaacccaggaggcggaacttgcagtgagcagagatcgcaccactgcactacagcctgggcaacaaagcaagactcaaaaaaaaaaataaaataattcatgtgattataataaatttgagaaaaacttcttttatagctcttgcctttctcaaagggggaggactcatcctggagagaaaccccatggatgtattcaacatggtaaatctttttgatggagctctcacctagttgcacatcacaacttataccagatagaaaatttatgaatgtaatcaatgtggaaagtttttcagcctggtgctcccaccttgttagacgtatactgaagactctgggaacatcgggaacgtcagagagctttcagcaggagatctcatctaattgggcaatagaaaactcatactgaagaaaaacaattccatgtaatcaatgtgagaaatatttcagtgacatccttgattttaattggcatcagggaaagtgtaatagagagaagccttatgaatgtagtcaaggtaggaaatctttctatacagctctggccttgttgcacataaaataactcatactggaaagaagcttcgtgactgtaatcagtgttggaaatggttcagttagagttctcacttgttgctcatcagataaatcataccggtgagaaactgcgagtgtcctgagtgtaggaaatcagctggagctgattacttatatggcatcagagatttcacattagagagaaacctcatgaatgtcactggtgtggaaaatcccgcagcaagaattctcaccttattgaacagcaaataactcattctggagagaagcctataaatgtagtcaacgtggaaaaactttcagacagaattattattgtgtatgcaccaaaaaattcatatgggcaaaagccaacatgaatgtctaaatgtgaaaaagccttcaggagactatctgaccttatggaacaccagatcattcataatagagagaaactgtatgcatataatcagtgcagaaaggcctttcaggcagcattctaatcatgtcaggcaccagataactcattcttgagtcaaactgttaatgaactttttatttattttattttatttttgagatggagtctcgctctgttgcccaggctggagtgcagtggcgtgatctcggctcactgcaagctccgcctcctgggttcacgtcattctcctgcctcagcctcccaagtagctgggactacaggtgcccgccaccatgcccggctaattttttgtattttttttttgagatggagtctccctgttgcccaggctggagtgtggtgacacaatctcagctcactgcaacctccacctcccgggttcaagctattctcctgcctcagcctcccgagtagcagggattacagacacacaccaccatgcccagctaatttttttgtatttttagtagagacggggtttcaccatgatggccaagctggttttgaactcctgacctcaagtgatccgcccgcctcggcctcccaaagtgctaggattacaggcgtgagccaccgtgcccggcctaattttttgtattttttagtggcgacggggtttcaccatgttagccaggatggtctcgatcttctgacctcgtgatccacctgccttggcctcccaaagtgctgggattacaggcgtgagcgaccgcacctggccaatgaactttttaaattgagacagggtttcactctgtcatccaggctggagtatagtggcaagatcatcactccctgcagcctcaacctcttggtctcaagtgatcttccaacctcagcctcccaaagttctggggttacaggtgtgaggcattgtgcccagccataacttttaaaagattttcttcccttttatttagacatcaaggtaaaagtaactttttttttttttttttttgagtcagaggcaggctggaggagtgcagtggcaccatctcggctcactgcaacctccacctcctgggctcaagccattctcctgtctcagcctcctgagtagctgggattacaggtgcccaccaccacacctggctagtttttgtatttttagtagagacagggtttcgccatgttggccaggctgaccttgcactcatgacctcaggtgattcacctgtctcagcctcccaaagtgctggaattacaggcataagccactgtgcccagccaaaggtaacatttttaatgtaacaatatatggtcattctttgctcttatgacacaatcctacaaaaggcgatcactaagcttaagcactaagcctaaaactgaataatataaacactgatgtagggaaagttgttcctcagacgactccattattgatacagacatggaaacagtaaacagaaatgtaacatcaaagttcttatttacttgaactttttttttttttgagacggagtctccctctgttgcccaggctagagtgcagtggcgtgatcttggctcactgcaagctccgcctcctgggttcagggccattctcctgcctcagcctcccaaggagctgggactacaggctcccgccaccacgcccggctaattttttgtattttttgtagagacggggtttcaccatgttaaccaggatggtctcgatctcctgacttcgtgatcggcctgcctcagcctcccaaagtgctgggattacaggcgtgagccaccactcctggcctgaaattttctataataaaaacaaacaagatcatttattatctcataatgaaaagtccctgaggtgagcataggcaatgttgattcagtggcacaaagaggattcattccatcatggatactggttctttccatttttctgctgtgccattctcagcatgttgcctttacctcctggggtggcttcctcatggtgccagtgtgcttgtaattgtcctacacatcacatacagacatcacggtccaggggcaaaagaagacacattgctatcttatgtccacttttaagactgagggaaccggccgggagcggtggctcatgcctgtaatgccagcactttgggaggccgaggcgggtggatcatgaggtcaggagatcgagaccatcctggctaacagggagaaacaccgtctctactaaaaaagaaaaattacaaaaaattagccgggcgtggtggcgggcgcctgtagtcccagctactcgggaggctgaggcaggagaaaggcgtgaacccggaaggcggagagtgccgtgggcctagatcgtaccactgcactccagcctggtggacagagcgagactccgtctcacaaaaaaaaaaaaaaaaaaaaaaaaaaaaaaagactgagggaaccttcccaggaaacccctagcagccttatttctccttggccagaatatccttgcctaattcacacagcaagaagcttgagtccattctgattagcttagaatccatcaagatcctcccttagggagttagattctagatttcccggaagaatctaaaaattgcagggtcgtgctagccaggtatgaaaataagcaagtaaaaagatgatgactgttgggtaaagctatcgacaaggtcagctacaaaacagtcaagccaaggaaggctagtcacagatgcaccccagacacaaaagcacagtccaggagctgagggtgcctgagccacagtggttcccgcctacctggccttcgtaggaaagtttcctgtggtctccctcattgaagagccaggacgggtcaggcggtggtgggtctcagacattgagccccacaacgcactgagactgaacatcagaccatttataataacagaactctgtcccacaacttctgcagcaataggtacaaaacagaacttggtcactgccagcctccctatttttttccctgtcccacttaggagctaccacagaaagccaaataggctcgactgagcgatcacctaggacgaatcgcctccagttagcgtgcttccaccttccactcggaatgctccaagcagggcactcccggggctttgtttctatcactaggacgcgtccccacgcccaggctgtccctgagtccctgccacaggcgcagatgttggcgggcgcccttgcccctgagctcccggttaacggccttggactgttctcatggctcagtcttggtctctctccccagcagggcaaggcgccgggaaggcacccgagatgacagcgccgagccccataggcgctagtcccgccctggacgccgaccgccgcctccacagtctcggcttcggttgctggatgagaaccagcgtggcccgtttaagggggaggggacaggcgctgcaaggagcagagccgcgggaagcaactccctaagccacaatgctagtcgcgaacacaggaaaaagctcatcccgccgccgcggggccccatgctcccgccggcaatgactatgcctgtgggagcaacggctaccggcgcgcggccttctgggagttgtttgttgcgcggagcgcgggcacgtccgccggccaccggaagcaccgccattggccggtgcgtgcaggtgagtctggcggcctcaaggttggctcggaggtttcactgttagccgggtgcggccggagcgcaggaccaggccagagccgccccaagtgatctgggcgtgccggagaaacgagcagggcctgcgggggtccctcatgcggcgaggccgagcaagggcaggggcctgatgggatcgggatctctccggcctcagggacggggaaggccggtccagtcaggtttcccctgcaggagcgcccggctgggtctgagcttgtcgggaggctctcctgctgcagagctgggagggaacttatagtacctcgcaggtacgggcaggggtggaactgggtgggactgggtgggactgggtgggactgggtgggactgggtgggccctcccgacagagggtgcctgggtcgagggctgcaggggcgggggattcaggctggcgtctggagctctggggctgccgacccagcgggcctctcccggctcctttttcctccctcaactcatcttctgcggcttatccacaggtggcagccaagagcctcctggcacagcggcaccaggcaggtgacgcctattggaccccagaggtcatcccagctccagacgtggacacattttcttccaatggtacgtgaagcttgaaccttgcagagaacatgtgtattttccaagtgaacagaagattaaggccagtccacgcagggcaggggtaactggggtgttgggggcctgcactggttaagcgatgctggtgcaccccatagagagactacagaggtgaacaggatgggatgtgtatgtaacgcctgtaagttagggatcggggttccatttgtgttgggtgatatttgatggggaccgtacaaggcagtgctaatgaggaaggcatggggttggatttcaagagtctaagggagtagggaaacatctgattgtggaaatgactccgtgtaaggagggatgccaaaagacaggaaggagtggaggaagactgtgtttctgtttccagcgtggagccagggtagaagtcacagtgcaaggaagatgtggtatgcctggtcagtctctgcatgggagttgaggagcatgtgggtgacatggctgaatgtggaggagggaatggcagtggcaggaagcccaggaggtttgggctggacacgtaacctggagcagattggaaacgtcaccccacaagcagggaaggagaaaactggaaaaggaaagagaaagcaactccctccccagccctgcagccagagggacttctgccagatcagccaccatacaggtccagtatgaggaacagatggggaattttatgtccaagtataatcactatgaatacatgtgttgtgccccttttgcaggttaacacaatgttaagctctgtaaatgcaactcaattaattcttttagcatcctcacaaggcaggtcttgctgtttttccagatgtctacggatgaggaaactgaggcctggagaggttaaagagacccgttcagagtcctacagtggcaggtaatggagccagtactttgacagcaggttgcaaagtgagtgttctcagccgttgcccttggatgcctccagacaaggaaggacagggttagagagcaaagatggacacaggcagtgagagattccccagggaaggccaggagcatcaggacaagatagtaacacataagatattgggcagacctcttggatgtggtctacatttgtgtttgtgtgtgtgtttgggagtgagagagcagagcaggatgggcaagatgaggagggggaaactgagagtgttggtcactctgttcaggcctcacctgagaggagaagaggcagggggtggggcactgggatatggattcatcttgaccagggagaagacatctcagctcagaatttgaagggagctactaatgagtgcaggcctgcaggagtttgtgtgccaggaggttgaaagagtccagagtcatcccttggagtgaattaaaaggccgatttgtctgcacagagaggacagtggtgggaggggactgaagtagggtgtgagagcatgagctcgcagctgtaaggggatagtgactgagtggatactggtgttcctgaactcctataccacccagaactcagaaactagcagggttgggcagagagggcagtcaagggcataggcagattgcacagaacaaacagatcagagaggccaagaggtgggcctcaggccaaggatgttaagaaaaagaacaggggcattgggctgggctggggtggggtgtaccagacggggaggctgggagcctgagtggtagtgtgcttagggccatgagctatggagctcccaccttctcactccccagccacgaggcctcagttaaattttactcaagttctttctgccttggtttcctcatttagaaagcagggtaaattctgttaattgtctttgtggggttacaaggaagatcaaatgcatgaattcaggcagaggacagggtacagtgcctggcctgtaggaagtacagcctgagtggtcagtggattttgaaaggtaggaaggcctggggcatttgctagggaaggaagctgagatcataggccccggtgtgttttaattcatgtctttattatttatttttttataaatggggtctcacatgttgcccaggcttgtctcgaacttctagcctcaagagagcctcctgccttggcctcacaaagtgctgggattatatgtctttaatacagagcagctttgtacatttttcagccatgtagtttattttattgtgaactatctgtttgtgactgtcacctctctttttcgtaggtctctattttcattaaagaagcttaaatattttgtcaagttcaaaaaatagtcctggtgtgttttttgttttgttttgtttttttcttgagacaaggtcttgctctgtcacctaggctggaatggtggcatgacctcggctcactgcagtctccgcctcctgggttcaagcgattcttgtgcctcagcctcccaagttactgggattacagatgtgtgccgccacgcccagctaattttttttttttttagtatagacagggtttctccatgttgtccaggctggtcttgaacttgaaaactaatacaaaatataatatgtaatgccagaaataagactagttctcacagtaaatgtgatgggtagaactctgttttagtagacactttgaaattgaactgaaaataaaaagttaaagatacgctctacttagaagagtcagatgatccaggctttgacaaacaggtggtgggatgagcatagatccatcagtgaaaacaaataaggaaatgggtggcaagataatatcagataaagtagacctttagtgcaacagcattaagacaattttatctttttttttttttttttttttttgagacagggtctcactctgtcacccagactggagtgcagtgatgccatcacagctcactgcagccttgacctcccggctcaagtgatcctcccacctcagccttctcagtagctgggactacaagtgtacaccactacacccagctaactttttgatttttttgtagagacttggtctcacttagttgtccaagctagtctccaacttctaggctcaagcagtcttcctgctttgacctctgtattagtctgttctcatgctaataaagacatatccgggccgggcgcggtggctcacgcctgtaatcccagcactttgggaggccgaggcggccggatcacaaggtcaggagattgagaccatcctggctaacatggggaaaccccgtctctactaaaaaaaaaaaaaaaaaaaaaaatacaaaaaattagctgggcgtgatggcgggagcctgtagtcccagctactctggaggctgaggcaggagaatggcatgaacctgggaggcggagcttgcagtgagccgagatcgtgccactgcactccagcctgggcgacagagagagactccatctcaaaaaaaaaaaaaaaaaaaaaaagacatacccaagactgggtaatttataaaggaaagaggtttaattgactcacagttccacatagctggggaggtctcacaatcatggcggaaggcgaaggagaagcaaagtcacaccttgcatggcagcaggcaagagggtgtgtgcaggggagctcctctttgtaaaagcgtcagatctcgtgaaactgtcataagaacagcaaggaaaagacctgcccccatgactcagttaccttccactgagtccctcccacaacatgacacgtgggaattatgggagctacaattcaagaggagatataggtggggacactgccaaccacatcagcctccaaaagtgctgggattacaggcatgattacaggattaaggcctggccttatcacctctttagtgataaaaggctataggaacaagatacattaatcttgaatgtttatggaccagacaccatagcatagatataaagcaaaaattgtgtacttaaaggaaatatgagaaggactatatgagaaacttcaacacatgtcttagaatttgatcaggaagacaaaatagagtataataaattattttaagtatggtgtcaaggtaggttatagatttatctacacacttctgtctgtaatatattctgcccacagaaaatttaaagacccagattttcttctgtgtacacaaggcccctcctatattagatctgtaaatcattgaattcccttggtcctgagtcctgttccctctctgtaacttgattgttcctgtttagtttaagtgctgctgagtctcatggacttaaatatctttactgtggtgccccagtatcttctctgggcttcaggctggcaaacgtaactgcctgtgtaacattcccacttggaaattgtgtccagccttaacatgtcttgattcccctcctcctacttgttcactctgggaaaagatataaactttcccaagttcttgaatctagaaagagatgtcattatttagcctccactcccaattctattgcataactgattatacttccaatgtaaagaatgaatctgcccacttctctccattttgctgtcccttgagtcctggcctttggtgatagccacttcttctcctcattccacctttactccccacagtccactctccagcctgccaacatctacataagcccagcaatgccttctctctctctgagatagaatctaaacttgtatgggactttctctagctgtggcccttgcctttctctatgctcaggtcacgggatgggccagggtcgttccagtctctggggtgaggtttccaatctgcctcagcttctgcctgtgcattggggtgcctcccttcccttaacctcatcttgtgggcctagaactgttgtctttccttgatcccatgctgactgcacttcattgttgttgcctgtttgctcatgtggcctccctgctacctgggaaaaggccccacaggccagggttgtgcccttgctgggtctgggtcccacttacatccctggcctggagcctggcacttggagtgagcccagagttaatcatcgttgatggtgacactgctgcttttcctctcttactgtgttaggatagctcaaggagcagttcttccctttgcctgtgtacctgcgtgcagcattctgcgagctgtctggcaattctgcttttgaatatttaacctaaacatacacatgcagaaagggaggcatgtatgaaagcaagagtggccattatagggctgatgtgagggtgaaatttggaaaactcctaaatattcagaaacattaaactctttaaagctgggactattaataaactacagtccattcatcaaattcagctattacagtgattacagctattacaaaaattgtttattggcattgggagatactttacaatgctaagtttcaaaagagtgtttacattataatcacatttttctagaaatgcattatggtgattagtgaacatgtgtgtattgacacaggaagatttctctctctttttgttgttttttgtttgtttgttttaaggaagatttctcaaaggacatgcagttaccagtccataataatggggatatgttccgaaatgtgtcgttaggtgactttgttgtgtgaacatcatcagtgtgcttacacagacctacatggttatagtctaatacacatacaagttatgtggtacagcctcttgctgctaggctgcaaagctacacagcgtgttattgtagtgaatactattggcaactataacacaatggtgagaatttgtatatgtaaatatatctaaacatagaaaaggtacggtaaaaatatggtataaaagataaaaaatggcccacctgtatagggtagctccattgtaatcatatgggaccactatcatatctgcggtctgtcactgaccagaacgtcattatggggcacatgacggtaggcacaaaatagtaacagtggctgtctcttaagatgttggattatttattattgttacttttagctatttacatctttgactttttatgcaattaacctaaaatgtgtgtgatttatacatcgtggtggctatagttaataatctcttatatgcttgaaaattgctaagaaagtaaaatattcccaccacaaaaaagtatgtgaatgcatatgttaattacctcaatttagccattctatagtgcatatgtatttctaaatatattgtacatgacaaatatatacagtttgtatttgtcaattaaaaaataaattaactttaaaatttgtgtgattaaaaaacaacttcataggccgggcttgatggctcatgcctgtaatctcagcactttgggaggctgaggcaggtggatcacttgaggtcgggagtttgagaccagcctgaccaacatggagaaaccctgtctctactagaaatacaaaattagccagacatggtggcacatgcctgtaatcccagctactcgggaggctgaggcaggagaatcgcttgaacccaggaggtggaggttgcagtgagccgagatcatgccattgcactccagcctgggtaacaagagtgaaactctgtctcaaaaaaaaaacaaaaaaacaacttcatgtctgggcatagtggctcatgcctgtaatcccagcactttgggaggccaaggcaggtggattgcttgagcccaagagtttgagaccagcctgggcaacatgatgaaaccccatctctattttgaaaacagaaacagccaggcacggtgactcacgcaatgctagcactttgggaggccgaggcgggcagatcacctgaggtcgggagttcaagaccagcctaaccaacatggagaaaccccgtctctgcttaaaatacaaaattagccagggtggtggcgcatacctgtaatcccagctactcggaggctgaggcaggagaatcgcttgaaccctggaggcggaggttgcagtgagccgagatcgcttggcgccattgcactccagcctgggcaacaagagtgaaactgtgtctcaaaaaaaaaaaaaaagaaagaaaacagaaacaaacaaacaaaaagccatcattttgagatatatacttataggaagctgcaaaatagtacagagtatcttgtgtgcccttcacccagcttttccagagagtgacatctttcacaagccagacattgacatcgatacatattgttacttagactgtagaccttatttagcatttttaagcctccatttgtgtgtatgtatcattctgtgaaactttttttttttttttaagacagagtctctctccattgcccaggctggagtgcagtggcgggatctcagctcactgcaacctccattccccgggttcaaacaattctcgtgcctcagcctcccaagtagctgagactacaggtgcgcgccaccatgcccagctaattttttgtatttttagtagacagggtttcaccatgttaaccaggctggtcttgatctcctgacctcaagtgatccacacgcctcggccttcctaagtgctgggattacggaagtgagccaccacacctggcctcattctatgaaactttttacctttttttttttttttttccccacatagggttttactctgtcacccaggctggagtgcagcggtgtgatcttggctcactgcagcgtctgttcccaggctccagcaatcttcccgcctcagcctcccaggtagctgggactacaggtgtgcgccaccacacctggctaatttttgtattttttgtagagacggggttttgccatgttgcctaggcttgtcttgatctcctcggctcaagcagtccgcctgcctctgctgcccagagtttacaggtatgagccaccacgcctggcctcaagcttctgttcatcttaagccaacaattttgtggaaattggttacaggggccacaagacactgagccgctccaggccggcagcttgctggtcctggcagcctctgcgagtgctgtggctctgatttcatcttggggcctagtgttaggcacagcctggcctggagggcggctcacctcacgggctgacggagccagacccttgccccgccagcggtccgaggggcccttccagctacaggtaggaccctcacacccaccttctttttgctttttttccccactcatccatggagacttccaagctgctttttatcttccctgtcttcctcatattttccttttgtgtcttaaatgctgttggagtgcagcagacaccccagtgtgtgacctgtgccagaagcctggagctttgttggcatggccagtattcggcatggaggcagggcctggggaggcagcaaggtgcggagccacccgaggatagagaagcctgaaaatgcgtctggaggtggggtgttgtggggccggggagctggaaggtgttccatgagactgacagacgtcacaaggtctgtggggagtgtctggagatttttaaaacttctcttgttgctcagactggagtgcaatggcacgatctcagctcactgcaacctctgcctcctgggttcaagtgattctcctgcctcagcctcctgagtagctgggattacagacgtgcaccaccacgcccggctaattttgtatttttggtagagacggggtttcaccatgttggtcaggctggtcttgaactcctgacctcaggtgatccaccagccttggcctcccagagtgctgggattacaggtgtgagttaccacgcctggctgagatttttaatctgggaagggatatctggagattgtggaggaatttgggctttctcctaagggcagcgaaaagctggcactccacagggttctgtgacacaggcttcattctgtggtgtccctgcggcttcctgggagagaggagaaaagtcaaaggcaggaccccatcaaacccaccgtggtaacccgcacaagaaacagtggctgagccaggcatggggcaggcttgtggagcggtgcatagtgcctggaagacggggacacagggttttggctgaatgtgaggagagcacgcaggaggcgtcaggaaggacttcccctctcactgctcagtacacgtgtgagcatcgatgtcacaggcttccaggcagaggagtgcgtacgtgagggtctgctgtgcgctcagtacagagtgggtgtgggtttctggctcaggagcctcccgttgttgtcacttctcctcctctgtctctggtcctcccacctccctcattgtagggatcattgtggtgaccccaacagtctccccatctaaagatcctcaacgtgggtctttcctttccatgtagggtcacatattcacaggttgtagggattaggatatggccatcattcaacccactaagtcacggtaaaaaaaaaaaaaaaattacaatgccctgatcagcatgcaaagggacaggcagaacagggaggggacacaggacacaggtttggtggcatcagggtgagtttcttctccttgtgcaggggaggcaagagtgttcagcatttgctgttagtgtgtcctgactggcctctgagttctccttcgcgttcaggaagagaaggtggtgaaaataaacagggctgggtgctctgtggctgcaggttttcttcacatctgctgatgtgtgaggttggcctcaggcttaagagtcctgtgcctgacacaggcttgcccgcaaggttcttcctccctgtaaagccatttctcagctcagcacagtcagcatttggggccagatcatcctctagggctgccccatgagctgtagaatgttttacaccttcctggcctctgcccaccagattgcagccagtagctgtccccttctacacctcttcccccctccactcccaccaaactctggaaactgtcttcaaacatggccaatgttcccggaaagcaaaactgcccccagttgaggacctctgctgtgaagaaatggcccacttttcttgaaattcctgaaggcctgtttctttaagtaagcctggtgttcactgtgtgcgggtccttgagaccattctcaggttgaccagatggactcagaactctgaaaagctcttatattcacagttacagtttagtacattgaaaagatacagattaaaattacaaggccaggcatggtggctcatgcctataatcccagcactttgggaggccggggtgggcggatcgcccgaggtcaggagtttgagcccagcctggccaacatggtaaaaccccgtctttactaaaaatacaaaaattagccaggtgtggtggcttgcacttgtagtcccagttacttgggaggctgagacaggagaatcgcttgaacccaggagactgaggttgcagtgacccaagattgcgccactacactccagcctgggcaacagagcaagactccatctcaaaaaaaaaaaaaaaattacagtggtcaaaggcacgcatgtaaacgggagtccgggagagaccaggaccagcattcagctcattcagctcccagtggagttgcgtagacagtgcttaattctccaaacgaccatgtggaccaggaagctcacccaagccttggtgcttaggtttctttattgagggatgtgttatgtaggcatggagcctatataaattactttggttactcaggccctccagagatccccctaatacaccatggcccagtgcccctggcaggcagagacattttaacaggcgggatatcccaagggctcagaggttacagccagtcaaggatcagacctttctttttctttctttttttttttttggagacagagttttgctctgtcgcccaggctggagtgcagtggcctgatctctgctcactgcaagctccgcctcccgggttcacgccattctcctgcctcaacttcccgagtagctggcactacaggcacccaccaccacgcccgtctaattttttgtatttttagtagagatggggtttcatcatgttagccaggatggtctctatctcctgacctcgtgatctgcacacctcagcctcccaaagtgctgggattataggcatgacttgaggtcaggagtttgagaccagcctggacaacatcctgaaaccccgcttctgcttaaaaaatacaaaaattagctgggcattgtgatgcgcgcctgtgatcccagctactcaagaggctgaggcaggagaatcgcttgaacctgggaggcggaggttgcagtgagctgagatcgtgctaccacactccagcctgggcaacagagtgaaactccatctcaaaaaaaaaaagaaagtacagggtgtggacaacccaggcttactaaaccagccctgcacattccctgtaatgtgtgtgtgatgtggcagtgtgaacattccagtatcatggaatgatgggtttagcatttacctttttggggtaggggtcatttttttctttttctttttctccttctgtttctctttctccttctcttttcttttctttttgttattgttgttgtttgagacagggtctcattctgtcaccgaggctggagtgtggtggcacgatcactactcactgcaatctcaacctcctgggctcaagcaatcatcctgcctcagtctctcaagaacttgggaccacaggcatgcaccaccatggccagccaatttaaaatatatatatatatttaaatatatatatatatatatttttttttttttgtagagatagggtctcactgtgttgcccaggcagttctcgaactcctgggctcaaacgatgcttccgccttggcctcccaaaatgttgggattacaggcgtgagccaatgtgcctggcccactttgttcttttgagtaagtttaatgttgggagtcaggtaaatgtgtacatacaccaactctgtcttgcaagttgaatattttgtcataacttatgttatactttaaaccttttttggtagggtgtgaatgcctcctccccaaacttgtcatctgatagcaattctaatcattcacattccatttctttttttttttttttgaggtggagtctcgctctgtcacccaggctggagtgcagtagtgcgatctcagctcactgcaagctccgcctcctgggttcacgctattttcctgcttcggcctcctgagtagctgggactacaggcgcccgccaccacaccggctaatttttttgtattttttagtagagacagggtttcaccgtgttagccaagatggtctcgacctcctgacctcgtgatccgcccgcctcggcctcccaaagtgctgggattataggcatgagccaccacgcccagcctacattccatgtcttttgtgtatgttggtgccttgtctgtcctccccctggcactgaggtcgcatgcagttcttggcattgcgttgtctttgtcttctgtttcagcactgaatttgctgttcacttctctctctctctctctctctctttgtgcttgttcttggaggacttgagtgcttgatttgcctgaagaatgttatgtgtctgttcagaagagagattaggacctgcgaagctcatgcctagaggggagagtattcctgcagaattcagcgtaggaaaggaggcctcaggcaccagaagtgtttgagagcaggagagttctcagaagagattgcctgggaaatgagagcatcgctggggtgaagtcccagcagctgcgagtgttgaggctgctgtgaggtggcccatgcttaggctctgtgttcctggccagagtgagtccccagcaccgcaacatctgcaggagatgatgctggtggaagaggtttcccaagcctttgaagggaaaggtgagaactgcctaaaaaatacagcacagagaaagcaagatttctgcaattcatggcttgatacttgatattccagggaatttttttttttttgtctgagactatggggcaagaaaaatgccagcgttcaaacctgggagaatgataagtgttcagcgtctgcaggggctgcctttatctgctcttctagcccaaatgggagttgtttcgcttttttttttttgagacagggtcttgctctgttgcccaggctggagtccagtggtgtgatctcagctcactgcaaccttgacctctagggctcatgcgatcatctcatctcagcccctacccccaccagttgctgggacctcagaccatgcccggctaacgttttgtgttttctttgttttgttttgttttgttttgagacaatgtcttaccctgttgcccaggctggagtgcaggggtgcaatctcggctcactaaaacttcccgccccccgggttcaagggattctcctgcctcagccttctgggtagctgggattgcaggcacacgtcaccatgcctggctaatttttgtatttttagtagagacggtttcaccatcttggccaggctggtcttgaactcctgaccttgtgatctgcccgcctcagcctcccaaagtgctgggattacacgcgtgagccaccgcacctggctggctaacgtttttatagagaggggggtctcactttgttgcctaggctggtcttgaactcttggactcaagcagtctgcctgcttcagcctcccaaagtgttgggattcctggcctgagccaccatgctggcctttggggtcagagttcaaggctcttcatgaactagaaagcattgtgcaaatgaaaggcaccatcaggtcgagtgagcgtagtcatatgagcaaaggcagagatacaggatgcgcttctggaatgttcagtggtctcgagtaacctgttggtgcctgcagagggtgtgcttcagtgccgatgtggcgatgggagtcagatgtgtggaagggtttggtgccacattcaagagggtttttgccaaactctcggtaggacagtgatgtgactgctgcaaggggattagacaagcagaagatatgaagggtttggtgactgagttcagtagagagggtgacaggcatgccctggcagtaggcagcatcctggtacttccagctgagaccgagggagggcatccctgtacaacaccccctcccagagccgagggaagttccctgcgccgccctgctggggagtgtcacatcctccttgtccccacacccccattgtcatcatttctgaaaacagcttatgatccattgtgatatgctaaatgtacaattacttagacacctggcctccacctcccttccttagtcacgaaatgataggaaaaatgcccctccttgcccttgactgttgagggggctgctgcgtgtctggactcacagctgagacgcccagcacatgactgggcacatccccgagcctgaggtagcccaggtccccaggcgtgaggcccattcccgcacctgggaagccctgcttgtggccggccccgcgttctctagggtgggtgttggccctggaggtttgcaggagccgaggggctgaatctctgcttgttttccaccccagactggtcttctgaggacctctgccctctacacagcggcctcttcaggtgcagggaggaaatggaagcacgttctatgctggttccaccccaggtgagtggggggtctttgctctcagtgccttggtctccatagatgtaaaatgggtccaggaatagcacccgcccctgcaggctgtcacacaggagcgctccgcagtgctggccagtgcttcccagtgaaatgctccagctccctgcagtaaagcgcggcacccgtcaccagcatggacgagcctagagctccctgcactagacccagcgcaagtctcccatgcctgttccaccaggccaggtctgtgcttccgacattctgcttgtggttgctcctcaggcccttgagggtggatggagctagccccacaccccgacagccacactgggccctcaatcctcacggacacccctggctgggggagtgtccccttaaagcactgtagttacctacctgcagagtcccctgtaaatggtgagggccctctcttcctggcttgcagacagccgttgtccgactgtgtctttatgtagtgaggagagagagtgagagcacacatgccctttagtgtcttttcctcttcttattttattttttgacgtaggatctccctctattgcccaggctggagtgcagcggcatgatcttggctcacagcagccttgaactcctgggctcaagcgatcctcccacctcagcctctccagtatctgggactacaggcatgcaccagcatgcttgactaatttattatatttttagtggggacagggttttgccatgttgctcaggctggtctcaaactcctggactcaagagatgcttcagcctcggcctcccaaagtgctggaatcacaggcgtgagccaccatgcgcagcctcttcctcttcttataaggactctagtcctattggattagggtcccacccttgtgacttcatttaatcttaatcaccattttttttttttgaaacggagtctcgctctgttgcccaggctggagtgcagtggcacaatctcagctcactgcaactccgcctcctggtttcaagcaattctcctgcctcggcctcccaagtagctgggattacaggtgcccgccaccacacccagctaattttttgtagagatgggatttcaccatgttggccaggctggtttcgaactcctgacctcaagtaatccacccatctcggcctcccaaagtgttgggattacaggcatgaaccaccgcgcccgaccccctgtcaccttcttgaacagttcttaaacagttaaaattaatcaccttgtttgtggggttttttttttttttttcttttgagatggagtctcaccctgtcacccaggctggagtacaatggcgcgatctcagctcactgcaacctctgcctccaggttcaagcgattctcctgctgcagccaggaagagtagctgggattacaggcatgtgccaccatgcctggctaatttttgtatttttagtagagacggggtttcaccatgttggccaggctggtctcgaactcctgaccttgtgatctgcccgcctcggcctcccaaagtgctgggattacaggcgtgagccaccgtgcccggtcaatcaccttcttcaacagtcactttgggagttagggttcaacatgtgaattttgggaacacagtttattctatagcattagccttttgaaaacacaccacagccctgatttgtcctacaggctgcagttttcccaccccgatttagagtgtctttcttacctcatttcgaatctgtgatttttgtagagaggaagtgggtgaggatctcctagtggagttcctgtcatttccagtctagaaatcaggaccactgctgtgactggcaagaggtgagatgcccagaaaaggaatggtacagaccacatacatggagctgtcccagtccgtttgggttgctataataagataccttagagtgagcaatttacaaacaacagaattgactgctcatagttctggaggctggtaagtccaagatcaatgtgtcaacagagttggtctggttggggcctgctgtctcatagatggcacctcttacatgtcctcatatggtagaaggtgaacacaggctccctcaagcctcttttatgaggacattaattgccttgtaaagaccccacctcttaacactatctcactgggtattaggttccaatgtatgaattttacggggggacaccaacatttaggccttaacaggtacctccgtgagggcatgaggacctggggtctctgagcagtaacaagtgccctgtttcaggcatctgtgtgcttcgaggatgtggctatggcattcacacaggaggagtgggaacagctggacctggcccagaggacactgtaccgagaggtgacactggagacctgggagcatattgtctccctgggtaagtggctgtgctcatggaaggaggttctacccctaggactcaaagctgtaccaagttctgaagggtgttctgggatgtgctggaagatactggaagcaggtccctttcaggtgcagttcccaggggttgcccttcattctatctctgggacaggtttgtgacttgtagtcctaacagtggggagtttcctcgggacagcactaggggctgaagcttggacccaggacatggttcttggtgtccaagcagaggggcaagtcctttttccgtctttgaccagggcttttcctttccaaatctgatgtgatctctcagctggagcaagaagaggacctgtgcagggcagagcaggaggccccccgaggtaagagcagaccttgtggtgagcagctcaacgtttaacaagcttggacagagagctctccgcagggccccaggggccaaggagggagccttgtttggaggaagcctccttgggtgctctttgcagcagttcacccattcaaaggagttcaccaattcgaagtatgcagttcatggcttccagtgtcttccctgagtgtggaaccctcaccacaatcagttctagaacatgttcatcatcccaaccatttaggcctctttacttgatttgtttttttttaattaatgtatgtatttatttatttattttgagatagggttttactctgttgcccaggctgaagtgcagtggcgctgtcttggctcactatagcccccatctccctggctcaagcaattctcatgcgtcagcctccctagtagcttggactacaggtgcacactgccacacctggctaattcttttgtttttgtttttgttttttaagacggagtttcgctcttgttgcccagactggagtgcaatggcacaatctcggctcaccacaacctccacctcccaggttcaagtgattctcctgcctcagcctcccaagtagctgggattacaggcatgtccaccatgcccggctaattttttgtatttttagtggagacagagtttcaccgtgttagccaggatggtcttgatctcctgacctcatgatccgcccgcctcagcctcccaaagtgctgagattacaggtgtgagccatcacgcctggccctaattttgtatttttattagaggtggggtttctccatgttggtcaggctggtctcgaactcccgacctcaggtgatccacctgcctcagcctcccaaagtgccgggattacaggtatgagccactgcacctggccattaatttttgtatttttaatggagatagggtttcatcatgttgcccaggctaatagactttattttttagagcagttttaggtttataggtaagttgacgagaaagtgcagagttcccacccatgtctgctgtcctacagacacatgcagtgtctcctgctgttaacaacttggatttgtattgtacatctgttacaatcggcaaacctatcttgaggcatcctttttttttttcccagacagagtctcactctgtcaccaggctggcgtacagtggtgtgatctcagctcactgcaacctccgccccccaggttcaagtgattttcctgcctcaacctcccaactaactgggactacaggcacgcaccaccacgcccagctaatttttgtatttttagtagagtcagagtttcaccatgttggccaggatggtctcgatctcctgacctcatgatgcgcccccctcagcctcccaaagtgctgggattacaggcgtgagccactaccccttgcccttgaggcatcattatcacccaaagtccatagtttatgatagggttcatgcttttttttttctttttttttttttttttttgagacagtgatgcagtcatagcttaagccttctgggcttaagtgatcctcccacctctctgcaccccagcctcaggtgccacagcatgcaccaccatgcctggctaatgtaaaaattttttgtagagatggagtgtcactgtgttgcccaggcttgtcttgaactcctgggctcaagtgatcctcccacctcagcctcccaaagtgctgggattacatgtatgagccactgcacctggccaggcttcactcctgatgttgtatattctgtgcatttggacaaatgtacaatgtcatgtatccaccattatagtatcagacagagtagttccactaccctaaatattctctgtgctctacccattcatccctccctcatccccagcccctggtgttactggtggaggatgtgcaggttcttggcattttgaacaaagaattggacaaaatgcataaaacaatgaaagaatgaagcaaaaaaagcatagatttatcaaaatgaaagtacactccacacaatgggagtggtctggagcaagcagctcaagagcactggttacagaattttctggggtttaaatcccgagaggtttcccattggttacttggtttatatcctctgtaaatgaagtagtggcccataactagtctgattggttggggaaggtgaccaacagaggctgaagtgaagttacaaagttacacctctatgcagatgaaaactaggccagtgaccagtctcattggttgcaggaagaggtactttccatttttcatctgcgacacagaaggcgggggttgcctctgatccttttgttatttggggcatggaaagtttgggttttccttttgattcagttccaggaagtcagcattaatcacccttaggtttcttgcctccataccctgttctcatacctcatttccccccgaaagacatgatcctcataaatctttatgggaggtaaagggattgatagtctttcttctgtaactgctttatgctgacctgaggcacagtccctacgtactggggaatcacaggactctctccccgccctgtctagtggagacaggatagcttcttgatggccaggggtggtgtctccacctggaactggctggaaacattgtcacatgatcatctgaagcttgatggtctctaggtgacaggaaatgaatttggttaagagtttaacaaacatggtccaaaaaccaaggcaagtatagtcattactaatgggctggccagaggaaggagccatgaaccccaacttagcatttttgaccaggagccccatgactcagatagctgttgttgtattttagaggcccagttgggtagtttttgggtggcatttgttactaatcctcattgttcggcataaaaacagcattcttcctctagaaaaagacctaagcccccctttacagcagttaggagatctcatccccttctgttttgccaagcaactgctgctgaggcatctatttgatttcgtatggtgatgatactttggccaatgtctctattttttcttttttactttgggcaatgtcattcaagctttccataaaatccttggaaaagcattggtaataggatagggatgttacaacccggctgactcccattcccagtcccgcggttatttgtagtcctaccaaaagggatgtgagttggatggttcatttgtgtctggcaattgcagttaaaggtataatgagggattggttcttgggagctatattaatttcacaggctaaataaacaagtgtaaaggttctagtccaattggctggtaaacataagtaagaactagttccacacaggtaaaaggctcctagtttttcaagacaagaattttctatggtaaacatgtgggttagcttgttgttttcactttcccaagtggttaaggtccctatgaaggtggccccagttaaaggctggaaaggaccttgggaaatattctgagttgccccagcagttctgttttcccattggaggtaattaggcttagtgtctaccaacaagcatccagaggtgtttcgtactggggaaccaaaagataactagatgtctgaggattagtgcagtcttcccaagggaaaatatgatcatagctagtgggcttaccttggcagtacttagactgtgtatcctttgaagtgtccttatctagggatggtttccatgaaaaccatacaggttttctaaatgacacagtctgggtaactgcctagcttatgtaatcatgtgaggggttaataatctctagggtgtagttacactgatgacttttcaaggttcccagggcctgaccaaaattttggcttctcttaatacaaagtggcacctggaattttagctctgtgtacattgatattgggccccaaatgggtttctgtgggatgcaaccccagaaagggtactctgatagtactggagaaggtttactgcttgtcctgtcatcgtagttcatgtttttttccccaaggccaaagattgggctgggattggggtggtagtgtatttgaatgatgctggagataaccaaagccaacagtctttgccagagctgggctggtggtatttaactgtctttgagttaaatgtaaagtttttaataaatacccagaatccattaactgctggaggggtaaagtgaagctctgttgtaaaataaagctgattcccattatgcgtggtcctgtatacacaggctgtgggtgaccattatggaaccaaaaaatacttatttgttattttgtgctatagaataggaacttcaggggtggatacctatgctgtcaggaatgcttgttataagaattaattaaaacactttgcttaattattacaaaggaagttattccatttgtttagaagaaagcaattaaattgtagaagtataacaatggctactattatccagtttaaagtaactaagcaacaaagacaccaaggaaagttggtaggcttttacttatcttttggctgtcttttaaacaggtacttcaggtctttcacaagtcacaggtgtagtggctgatgggagcttcaggttcccggtctgggacttcacataacacaggcttgacaccagaaagatgtatccaactatctaatcctagtactttgaccccagaaggcatggccagtactgaaaatggtcccttccactttgattgtaattattgagcaggtgatccctccttctatgttttaacaggtaccttgtctgttggcctgattttgggttggtggttagttcctggtgtggggagcttttgagttccaaactcttgtaaagcctgctgaaataatcccaggttaactaggtattttactaaactggatgtttctggatcagagattagatcattagttaaaaatggccttttgtataacatttgtgtgggctcataataattttttctctaggggaattatggattcttaagagggctatgggcagtaagcagatccaagtttctgatgtttcctgacataggaactcctattttagagttagctaagctctttccacttttttggaggattgaggtctccatgctgaatgtaaataatagttgattctgagaaccttagcaaccccttgagttatttgggagacaaaagatgggctgttatcactttggaggctttgaggtaacccaaaccaggggattatttcctttaagagaacctttataacttcattaaacttctctgttctggtagggtacacttcaacccagccaataaaggtgtctgttagtactggcagaaacttttatcctttgcaagctggcatatcagtgaggtctaattgccagtcttcccctttaactttagccaatatattcacacacagaatcccttctacaattaatttttcataaaccttctacagcttgtcttttaaccctccaaactttggcaagaaatccatattctcatgccttttaccaaaagtacattctactttttttacatgaatccttttcacgacttacacagaccttctatgacatgcctggactttctgacttgtcctaaacatccctctttaaacaaccattcatttaactttagggcaagaatttaccatacaggatcctgtctcatacaaaattattattgctacatccttccctaccaagaatacatcttcatatacataactttcttcacctctctctcccgtacttactggtttcttactaccttgtttcataaataacccttttttttaagtcaacaacctgaatcaacctttagacaacctctgaactacacaaaatcatttctttcttaccaatagcacatcttttttggcaccttttgtatacagaatcatttgttaactagaattcttatccttagtaaccttaaattttagtgaaaccctaaaaagcaagaaatcctgaactattagatatgagcattttatagatgagaagaattccacaacttttagaaacatatttccccgtatcataatccttcctttttatttacttattatcattatgtttttgagacggagtcttgctctgtcaccaggctagagtgcagtggcacaatctcggctcactgcaacctctgactccctggttcaagcaattctccagcctcaacctcccgagtagctgggattacaggcacgtgccgccacacccagctcacttttatatttttagtagagacagggtttcaccatgttggccaggatgggctcgatttcctgaccttgtgatccacccaccttggcctcccaaagtgctgggattataggcgtgagccaccgcacccaacccataatcctttcttaattggaaatgacccagatatccaatgaacatcaaaaacaattttaagattttaagttacacaaagagtttacctaaaacatttatcccaatttcatttactcaattctttcattttaacattttatctagattacttctgaaaactaagatagtagacaccatcctctaaagttatttccttgttagccatttttttattaccaatgaatatcatttgctcactgaaaaaaagcctcaaagttaaatacacaggtatttttgccaataactcagaagattcagctaacaacattaaattagtctgatttgtttatttattttttgagacagagccttgctcttttgcccaggctggagtacagaggcacaatctcagctcactgcaaccttcatctcctgggttcaagtgattctcctgcatcagcctcctgagtagctgggacaacaggcatgcaccaccacatccagttaattttttttatttttagtagagatgggttttcactgtgttagccaagctggtctcgaactcctgacctcgggtgatctgcccaccttggcctcccaaagtgctgggattgcaggcactagccaccatgcccggccaaactagtctcatttgtcaaagaaagcatacaaaccaggaccattttttgttttggctgggttaatacctttataaccttctgtgccaaacactgacaccttaaaatatcttgcaaagacaaatataaaaccatatatgttgacaattctgaagacatttctattttcattttaccaataattttaaagccaacttctttagtaaagatttacttaagtcggctgggtgcggtggctcacgcctgtaatcccaggcaggcggatcacgaggtcaggagatcaagaccatcctggctaacatggtgaaaccccatctctactaaaaatacaaaaaattagccaggcctggtggcgggcacctgtagtcccagctacttgagaggctgaggcaggagaatggcgtgaacccgggaggcatagcttgcagtaagctgatatcacgacactgcactccagcctgggtgacagaacgagactccatctcaaaaaaaaaaaggaacagcagcacaaatgcctggatacatgcaactccatctcactttcccattcaacagcaaactccagattccaaacaatgttggggccaaacagtattgcaaaagaatatcaagtgtttcctccttagattatcagggtcaaatttattccagtcgttgaggatgcagccaagcagggagtcagatggaatagatggagtgtttcctattattgtctgtaagagagaaaatcctagggagggtgtagtactattcctcagaacctcagcctagggtgtcccctttggagaggttgaggtctggagttggatcccctagaggatccccctttggggtccaatcttagagtgtcagacatctctgactttaggtgggcaccagtgctgctttatatgttttccctccagtggcgatggtctactgtgagctttcctttggttcctgggcgtaatcccagacttttagtatcccactaatttcagtgtgatgtatcttcctgcattcctcacaggactaaggaggttctgaaacattgcagagttaatagtaccaaggttggtggggtattctctgtgaaggaaggatccagcggtatgtgaaagactgagattgagaatttctttctttcttttttttttttttttcttgagacagagtttttctttttttgagatggagtctcactctgtcgcccaggctggagtgcagtggcgcgatctcggctcactgcaagctccgcctcccgggttcacgccattctcctgcctcagcctcctgagtagctgggactacaggcgcccgccaccacgcacggctaattttttgtactttttagtagagatggggtttcaccatgttagccaggatggtctcgatctcctgacctcgtgatctacccgcctcagcctcccaaagtgctgggattacaggtgtgagccacagcgcccagccttagacggagttttggtcttgttgcccaggctggctggagtgcagtggcatgatctcgggtcactgcaacctccgcctcccgagttcaagcagttctcctgcctcagcctcctgagtagctggggattacaggcgtgtgccaccatgcccagccaatttttttgtatttttagtagagctgtggtttcaccatgttggccaggctggtctcaaactcctgacctcaggtgatccacccgccttggcctcccaaagtgcagagattacaggtgtgagccactgcacctggctggggttgagaatttctgtgagattcagggaaagcaaattgatgcagaagcaatgaccgtcaacctatgggatcccctcagtgaagtctgagatgtagaatgtctactgaagcttgtggatcccaaaggtcttcagacagtcaaatcgagtaagagaaggtaagtcaaatgcatgagatacattatcttttgcccttacaggctgactttaaggagaattttgcataagaaaagaggatttaagtcacctgaaatatgcgtgagttcgccctggatgagctgccgctgccagttgcatcacagatagggatcagggactgtaactggaaaatagagaaaagagtcttttccccttctgggcagggcagctatccccatttacgccttggccttcaggcaacaccagagggtggccctggccagctgccctcagttaccaaggaactagtaggaaacggcagctgaaagattttctgaaaaagagaaaaaggaaaaggactaaggtccttcacccgaactgggtggtagcggtcaggcacttccacacagaaatctttccgtttcaccagagagtggctccggccagaaacttacagttgcttgcatgcttatgtgctgtccaccaaggatccgtaagttggaaagggaaaaagagagagagaaaaggattcccctatatggaaaagggaaaacaaaaagagaaaagaaagaaatcccaaacctcgagcctacctcctggctggctcaccaaaatatgttaccagtggagggtgtctatgttcttggcattgtgttcttttacttttttttttttgagatggagtcttgttgtacccaagcgagttaaaaatacgccacactttgagacgaattaagagtccttaattaagccggcggccaaagagacggctaatgctcaaaattctctcggcctcgaggaaggggcttgattaacttttatacctaggtttaggaaggggagagggactcaaatgcaataagtctacagaagtaaaaacatgcaagaatcaacagaagcaaaatggttacagagagataaacaacttaaacggttacaagaagagcaacggtaccacgtgcaaggttctaaatctttcattataattagatatatagggtctatgccggacacaaactcaaggttttctgttgttatctctttgagaaaaatcctgggaacttcatacattgttggtgttagtgccttatcagttaattgggctcttttgaaatgctgaggatctgtttacccaggccaactccttaggaaagggggttgggtaaggagcccttagtgtcttgtaaattaaggggtcaattggagtttgtccggccttcccagctagagagagtcttatttacatgagaagcaaggctaggtgattaaagagacaagcaggacaaaattcaaagtaaccagttagagtaaaaacaagcttaggcatttcagtctcactctgttgcccaagctggagtgcagtggcacgatctctgctcactgcaagctccgcctcccaggttcacgccattctcctgcctgagcctcctgagtaggtgggactacaggcacccaccaccacgcccgtctaattttttgtatttttattagagacgggttttcaccatgttagccagtatggtctcgatctcctgacctcgtgatccacccgcctcggcctcccaaagtgctgggattacaggcatgagccaccacgcctggctggttcttggcatttttaacaaagaattggacgaaacacacaaagcaacaaaagaagcaacaaaagcatagctgtattgaaacaaaaatgcacttcacagagtgggagcaggcccaagcaaggctcaaaagcactggtcgcagaattttctggggtttaaataccctctagatgtttcccattggtcacttggtttacaccctatgaaatagtggcccatgaccagtctgattggttgtggaaggtgaccaagcagaggctgaagtgaagttacaaagttacgctctatgcagatgtctgactggttgcaggaggggaccaatccgaggcactttccatttttcatctgcaacacagaaagttggggggagttgcaaagggagtagcctctgatccttttgttacgtgggcatggaaatttagggttttccttttgattccgttcatgaagtcagcatgaatcagccttaggctccctgcccccagaccctattctcctgcctcactggcaaccactgatctttatcctgtctccatagttttgcctttttcagaatgtcatagttggggtcattcactacgtagccttttccgactggctgctttcactaagcaacatgcatcgtgtgtatcttcataccaccctctcacgtttcccccaggctggagatgttgagtttatctgaatttttctcgtgtcttcctgctcctccttccttgtaactctctcgcctgcagcctctgttatttcttcctctgaaggtgcacccaggcttacttatctaccctcctccctgggccatgccctgcacaccatacctcagtcatgtcatcctggattctgtttactgtcagtctttctgtttggcataggcatccctcttggctggcctgtgaggacagcccctttcctcatttcatgctcctaatggagaagccactgcaagatatttaatgtccttcacctgattttccatggccacgcaaaacctggacacaactcagccacccactgacttctttcctgcttctcatcctcaaatacccttcattgggctgttgtttcttttgaaaacatcctcccatgagggattccacagtgattccccagaggaaccacagagttgggatgaggacagtgcaagtgtgagagtgctgggtgtgagggcactgggtgtgagggcaccaggtgtgagggtgctggttgcgagggcaccaggtgtgagggtgctgggtgcgagggcaccaggtgtgagggtgctgggtgcgagggcaccaggtgtgagggtgctgggtgtgagggcaccaggtgtgagggtgctgggtgtgagggcaccaggtgtgagggtgctgggtgtgagggtgctgggtgtgagggcaccacgtgtgagagtgctgggtgtgagggcaccaggtgtgagggtgctgggtgcatgcaaggatcttgcccaggagggaagagagcttttgattgagaggagggaaacatcctctcagaagtcaagggatggccacagagtgtagttaatgtgttgccaaaggatccttgtgtcctcatgagctcagagagtgaggcatgagaacttgaggtaggccgcagtagtgttgaccgtggtggccatgcaaacataatgaacagagtgacaagcagagtggaggatctttaggacctggacaaggatcctgagctgggagcctctgccactcatttttagaggctccgtatcttcaacagagaggaatccccaccaggacaataacaaggatggcaagatcaaccatattttgtaatatcagtgccagacactgtgtgaggctcacatagtgattcattgatgcctcaaaataaatcttgtaggctaaacattcttactccgggctacagcaaggaaaatgaacctctaagaggctaaggacctgtctgaagtggcaaacggtggagcccagatgcagccagtcatgctgatcatgctgcttcagagaccatgcagtcttttctggagagtcttctattgggtcaattctggaatgcttaaataagtttttctctgtttgcagcctgaagaaatggtagaattggtgcattaagaatatgaagtcagtgttgatgtctgagatgcaattatgagatccagaagtggaacagaaactgatattctaggactaagcaccagttaggagtctgtgtttgcttcctgtggctgctgtaaaaaatttccaccaacctgttggcttaaaacaatgcaaatttattctctaaaagttctggaggccacaagtccaaaatcaatgtcactggatcaaaatcaaggtgttgatatggttgtgctccctctggatgctccaaatggaaaacacatttctgtcttttccttctcctgttggttgcagcattctttccagtcttcagatatcttctgctgtgtcttctcatcacctcctctgtgtttcaaatctccctctgcctttctcctataggaacacttgtgattacatttagagcccccctggatagtacagaaaaaaaatccccatttaaaaatttttagcagggtgtggtagcaggcacctgtaatcccagctactcaggaggctgaggcaggaggatcacttgaacctgggaggtggagttgcagttagccaagataatgccacttcacttcagcctgggcaacagagccaggctctgtctcaaaaataaacaaaacaaaataaaataaaaatactaatcacagaagggtacattggcttggctgtaatcccagcactttgggaggccagtcggggaggatcacaagagcccaggagtttgaggctgcagtgagccatgattgtgctgttatccggtctgttcaacagagcaagatcctgactgtagaaaactaagtaaataataataataaaattctaatcacatctggacagttcctttttcccaaaagttcacattcacagagtccaggggcttagaacatacatactttttgcaatggttaatggctttatatcctgcagacccagttcattctgtggatttctctttttatcttcacctccctgcttattctcttttttgagacagggtctcactctctcacccagactggaatgcagtggcccgatcttggttcactgcaacctccacctcccaggctcaagcgattctcctgcctcggcctcccgaggagcttagactacaggcgcccaccaccacacctggctaattttttttttatttttattagagatgaggttttaccatgttgaccaagctggtctctaactcctgacctcaggtgatccacctgcctcagcctcccaaagttctgggattacaggtgtgagccactgcacctggcccctccctgcttattcttattcttctgccctctatttggggactagtgttacttagtcacttctttattatgtttgcttgtattttgcactttaccactgataccatgtttgctgatccatccctccctttcacagcctgcatacggattacagtttgtagtttggaaacaaaccagagacacttccattaaacagttgtctccttcatctccccctccccctccccctctgatgcttctccagtaacttaggcattttggatttctttcagactggaaagctacccttgaggagaataggttgaattctgaaaaagatcgagctagggaagaactatcccaccacgtggaagtgtacaggagtggaccggaggagccaccctctttggtattaggaaaagtgcaagatcagagcaaccagttaagggaacaccaggagaactccttgaggttcatggtactcacctcagagagactgtttgctcaaagggaacattgtgagcttgaacttgggggaggttattctctaccttctactttaagccttctacctacaacattacctacaagtacaggtttccctaagcccaactcacaagttaaagagttgaaacaaaattcagctttcattaatcatgagaaaaatggagcagatgggaagcactgtgagagtcatcagtgtgctagagctttctgtcagagtatttacttgagtaaacttggaaacgttgaaacaggaaagaaaaacccttatgaatatattgtcagtggtgactctctcaactatggttcctccctttgttttcatggtagaactttttcagtgaagaaaagtgatgactgtaaggattatggaaacctcttcagtcacagtgtgtctctgaatgaacagaagccagtgcattttgggaaaagtcagtatgagtgtgatgagtgcagggaaacctgttctgagagtctgtgccttgtacaaacagaaagaagtggccctggagagacccccttcagatgtgaggaacgctgtgctgccttccccatggcctcatctttttctgactgtaacatcattcagactacagagaagccatctgtgtgtaatcagtgtggaaaatctttcagctgttgtaagctcatacaccagagaacacacactggagaaaagcccttcgaatgtactcagtgtgggaaatcttttagccagagctatgaccttgtcatacatcagaggacacacactggagagaagccctatgagtgtgacctgtgtgggaaatccttcacccagagatccaaacttattacacatcagcgaattcacactggagaaaaaccgtatcagtgtattgaatgcagaaaatccttcaggtggaactctaacctcattgtacatcagagaattcatactggagagaaaccgtatgagtgcactcactgtggaaagtccttcagccaaagctatgagttagttacacataaaagaacgcacactggagaaaaacccttcaaatgtactcagtgtgggaaatctttcagccagaagtatgaccttgttgtacatcagaggacacacactggagagaagccctatgagtgcaacctgtgtgggaaatccttctcccagagttccaaacttattacgcatcagcgaattcacactggagaaaaaccgtatcagtgtattgaatgtgggaaatccttcagatggaactctaacctcgtcatacatcagagaattcatactggagagaaaccgtacgattgcactcactgtggaaagtccttcagccaaagctatcagttagttgcacataaaagaactcacactggagaaaagccctatgaatgtaacgagtgtggaaaagccttcaatcgaagcactcagctcatcaggcatctgcaaattcacactggggagaagccgtacaaatgcaatcagtgcaataaagcctttgcaaggagctcctaccttgtgatgcatcagagaactcacactggtgagaaaccttttgagtgtagtcagtgtgggaaagccttttcagggagctctaaccttctttcccatcacagaattcattctggagagaaaccctatgaatgtagtgactgtgggaaatccttccggcagcaatctcaacttgtagtgcatcggcggacacatactggagagaaaccttaggagtgcagtcattgtgggaaagctttcatccagaggtctcccctcatcatgcaccagaggacgcatgtcggtgggaagagctatcagtgtgacgtgtattaagccagcggttgtgactcattgaacatcagaggacatatcctggagaaaagccctacgaatgcattgattgtgggaaagccttcaatgatcgctcaacccttagtaaacacgagaggacacacactggaggcaaaccctatgaatgtgaccattgcgagaaagcctttagccaacggtgtcaacttactaggcagcagagaattcatactggagagaagccctgtgaatgttaacaaatgtggaaaagcttccagttatgatactttccttattcaacatgagaaagctcatgggcaagaaactctatgaataaccaagatggagccgggtgcagttgccaacacttgtaatcccagcagtttgcgaggccgaggcaggtggatcacttgagcccaggagtttgaaaccagcctgggtaacatggcaaaatcctgtctttacaaaaaatacaaaaattagcctagcatggtggcgcatacctgtagtcctagctactcaggaggctgaggtgggaggatcacttgagcttgggaggcggtggttgcagtgagctgtgatcatgccatcacaccgctgccttgtgagagattgagacactctaaataaataataaccaagatgggaaatttccctgccagaccttgtttactagaaatcaggtggccaaaacatgactctcagagtggggcttcatgaccatgtgcatcagaattgcctggagtgtgcactgaaactgtgtattaccaagctcactctagccaactaaataaaaatctctggcagtaaaatccaggagtctgcagtttctaaaatcacacaggtgagtgggcatggtggctcatgcctgtaatcccagcactttggaaggctgaggtgggtggatcacctgaagtcagaagtttgagaccagcctggcaaacatggcaaaactgtctctattaaaaatacaggccaggggccgggcacggtgcctcacacctgtaatcccagcacttaggtaggccaaggtgggtggatcacgaggtcaggagattgagaccatcctggctaatatggtgaaaccctgtctctactaaaaatacaaaaaaattagctaggcatggtggcgggctcctgtagtcccagctactcaggaggctgaggcaggagaatggcgcgaacatgggaggcgtagcttgcagtgagctgagatcacactactgcactccagcctgggcaacagagcaagactgtctcaaaaaaaaaaaaaaatacaggccaggcacaatggctcatgcctgtaatcccagcatttcgggaggcaaaggcaggcggatcacctgatgtcaggagttcgagacccacctcaccaacatggagaaaccccgtctcgacgaaatatacgaaaattagccaggtgtggtggtggtaatcccagctactcgggaggctgaggcaggagaatcttgacctgggaggcagaggttgcagtgaaccaagatcaagccattgtgctccagcctgggcaacaagagggaaacttcatctcaaaaaaaaaaaaaaaaaaggactctggtgaggcttggtggctcatgcctgtaatcccagcactttgggaggctgaggtgggtggatcacttgaggacaggcattcaagaccagcctggccaacatggcaaaaccccatttctactaaaaatacaaaaattagccgggtgtggtggcacacatgtgtaatccagctacttgggaggctgaggcatgagaattgcttgaacctgggaggcagaggttgcagttagctgagatcatgccactgcactctagcttgggcaacagggcaagactgtgtctcaaaaaaacaaacaaacaaacaaaaaaccctgagctggctgtaatggctcatgcctgtaatcccagcactttgggagaccgagcggccaggcagatcacttgagcccagtagattgagaccagtctgggcaacatgttgagaccccatctctacaaaaaatagaattagctgggcatggagctgcacacctgtagtcccagctactcaggaggctgaggcaggagtattacttgagcctgggggtgggggggatggtctcacctgcagtgagctgagatcacaccactgcactccagcctaggcaccagagcaacactgtgtctccaaaaacaacaaaatattggactctgaatatttcagggattcggttgtgctttaactttgttgctcagttggtttgattgtaatcagaactggcagcatgttaatatggaaaatacttatcaggggatgtgaaaacaggagcccaagtagtatgttcacagaaggttacaagcacataatttaaattggtccactcagcaacatgtttcctaaaagaaaaaaatgtaaattgacagtagtggggagactagaagaggccatgtctgcatatttatttatttatttatttatttatttatttaagacagtctcactctgttgcccaggctggagtgcagtggtatgatctctgctcactgcaagctccacctcctgggttcacgccactctcctgcctcaacctgctgagtagctgggactacaggcacccgtcaccacgtctgtctaattttttgtacttttagtagagacaaggtttcaccatgttagccaggatggtcttgatctcctgacctcatgatccgcccacctcggcctcccaaagtgctgggattacaggcatgagccgccacacccggccgcatttatttttattttttgacacaggctgttgctctgtcacccaggctggagtgcagtggcgcagtcatggctcactgcagcctcagcctggatcaactgatcctcctgtccttgcctcctaagtagctgggaccataggcatgtgacatgaagcctggctaaatttatttttttagagacgaggtctcaccatgttgcccaggctggtcttgaactcctgggcccaagtgatctccagccttggcctcccaaagtcctgggattacaggcatgagccatagtgcatactattactgcacatttaagcaggataagagccaatgggagggtgagcatggtggcttatgcctgtaatcccagcactttggaaggccgaggcaggcagatcccttgaggttaggagttcgagaccagcctggccaacatggtgaaatcccatctctactaaaagtacaaaaaattagccaggtgtcatggcatgtgcctgtaatcccagctactcgggaggctgaggcaggaaaatcacttgaacccagaaggtggaggttgcagtgagccgagactgcgccgttgaactccagcctgggcaaaaaagcgaaaagcgagactctgtctcaaaaaaaaaaaaaaaaaaaaaaagggctgtgtgcggtggctcacgcctgtgatcccgacactttgggaggccaaggagggtggatcacgaggtcagatcaagaccatcctggctaacacagtgaaaccccgtctctactgaaaatacaaaaaatcagccaggtgtggtggcaggtgcctgtagtcccagctacgagggaggctgaggcaggagaatggcatgaacccaggaggcagagcttgcagtgagccaaaatcatgccactgcactccagcctgggcgacagagtgagactcggtctcaaaaaaaaaaaaaaaaaaaaaaaaagatggaagtatagccaatagcgaaacatacagaatgaggaaggctggagagggtcaggcgaggagaggctgtggcagcagatgtggcagccccagcagagccatagactgatagaccagaaagtgggttaatcgaaggtctgtccatgaaactcagactcttccccatttttttttcttgcctggcattacctatctggctgtgggtagcaaaaattaaagtagggaaggagtcatgtgctaaaagattagttcaggggacaagggaatctgatgtattttgctctgcagcaagggctgctttattctggcatttcagaactttttacctgatagctggttctcgccctcttcaccctcgagcaaagcgtactgttaaagcagccccgcctgtctgtggagcttcctgtctgctttctgatagtctcttcaatatgggtgggaggcaaggagcaaaagataaagtctccatcatgagagaaggtatctaagacagcagaaaagacagatattcagaggaaccaaatattctttgttttttgagacggagtctcattctgttgctcaggctgtagtgcagtggcacgatctcggctcactgcaacctttgcctcccaggttcaagcaattctcctgccgcaatgtcccaagtagctgggattacaggcacgtgccaccatgccaagctattttttgtattttcagtagacacggggtttcaccatgttgaccaggctggtctcaaactcctgacctcaagtaatccacccaccttggcctcccaaagtgctgggattacaggtgtgagccaccgcacccagcagaatcaaatatttaaagcattttgttaacgtaaaagtgagtcaagaaagggttacaaggccgggtgtggtggctcatgcctgtaatcccagtactttgggaggccgaggcggtcggatcgtggggtcaggaggtcgagaccagcctgatcaacatggtgaaaccccatatctactaaaaatacaatacaaacattagctgagtgtggtggtgggcgcctgtaatcccagctacttgggaggctgaggcagaggttgcagtgagccgagatcatgccattgcactccagcctgggtgacagagcgagactccatctaaaaaaaaaaaaaaaaaaaaaaaaggtctggtgcggtggctcacgcctgtaatcccagcacttcgggaggccgaggcaagcgtatcacgaggtcaggagatcgagatcatcctggctaacaggtgaaaccccgtccctactaaaaatacaaaaaattagctgggcatggtggcgggcacctgtagtcccagctactcgggaggctgaggcaggagaatggcgtgaactcaggagaaggagcttgcagtgagccgagatcacgccactgcactccatcctgagcaacagagcgagactgcgtttcaaaaaaaaaaagagggttaccagtaaaaaataagacagactgggcgtagtggctcacgcctataatcccaacactttgggaggccgaggcgggcggatcacctgaggttgggagtttgagatcagcctgaccaacatggagaaaccctgtttctactaaaaatacaaaattagccgggcatggtggtgcatgcctgtaatcccagctactcaggagtctgaggcaggagaatcgcttgaacctgggaggtggagattgcagtgagccgaggtctagtgccattacactccagcctgggcaacaagagtgaaactccgtctcagaaaaaataaataaaaataaaaaataagatactttgataaaatagaacaatgagaaccagaacaggctctttgaaattacaagtaagattgttcaatgttatagatacaatgtttagtgagaaacagaatgcttgttgcctggtgctgcaaagaaatagcactcaaaacataaatttaattctctcagcaaggccgtttttactttctgcagaaagggtgctcatcacagatggaacaatggcaagagcacacctgaacaaaggagggaagcaatttttattccttaggcagtttgtccctgctactgtgtcctgtctccgttggctggagccagcctgcacaatctaaactaaaactagattagctaacagtttaaaacttttctaaataggtaaaagtagtggaaagacgaaggaaaagaggaagttgcttatgccagatatggaaggagcataggctgtaagctggaacgtgaccatgagcatgtccagcacaaataacttggttaaggtacagggacatagaacgtactacgtgcctgtgagcatgtttaccagctacataggatagggcctaacaaagacttactagcacaaagcaaggaggtttcaaggaagttagtttataaaagaaactattattttttaacacttatgatttattctttaacaagaagggaaactttgaagaggaacttttactttccacattgaacaaataagtaagaaaaagaaagggaaacttccccagggctgaaaggaaattttcaggtcatgccattattatcagaattaataagacccatgcatcgtggaaaactgagaacaccacgactaaaaacagatggcaggctgggcgtggtggctcacgcctgtaatcccagctctttgggaggctgaggcaggcagatcacctgaagtcaagagtttgagaccagcctggccgacattgtgaaacctcatctctaataaaaattcaaaaattagccaggcatggtggcagccgcctataatcccagctattcaggaggctgaggcaggagaatcgcttgaactcgagaggtagaggttgcagtgagctaagattgtgccactgcactccagccttgggcgacaaagcgagactctgtctcaaaaaaaaacaaacaaaaaaaatgtcagggtcgggcatggtggctcacacctgtaatcccagctacttgggaggctgaggtaggagaattgcttgaacccaggaggtggaggttgcagtgagctaagattgtgccactgcactccagcgtgggcgacaaagcgagactctgtctcaaaaaaaaaaaaaaaaaaaaagatggcagggctggcatggtggctcacgcctgtaatcccagcactttgggagaccgaggcaggtggatcactctaggttaggagtttgagaccagcctggccaagatggtgaaaccctgtctctactaaagatacaaaaattagccaagtgtggtgataaatgcctgcaatcccagctactcaggaggctgacgcaggagtatcacttgaacctgggaggcagaggttgcaatgagtctagatcatgccactggactccagcctgggcgacagaatgagactctgtctcaaaacagagcaaatggcatggcagaaccttctctagagaaaatagttttgaatctaagaaaggaatagctttaatctagaaaaggaatagggcaagaaaaggaatgtttattcacccataacttaaaaaaaaaggtaattttaattgaaggcttcaaggtaaattgtgctcaaactatacaaattctgctagatggttatagttcctatgtgaaggtaactttagaaagtagtgttcacttgacactgatgtgagtaattcttgctggagggggcaaaaagctcatgaaatttgaataaaggaggaggagatgcagtcagattgttgattgacccttcagggaatggcatttgcatagctgtgacgtgaaccctaggtattggctttttttttctttttttttgagaaggagtctctgttgcccagtctggagtgcagtggcgcgatcttggctcactgtaacctccgcctcccgggttcaagcaattctcctgcctcagcctcctgagtagctgggattacaggcacgtgccaccacgcccagctaatttttgtatttttagtagacacagggtttcaccatgttggtcaggatggtctccaactcctcaccttgtgatccgcccaccttggcatcccaaagtgctgggattacagggatgagccattgcacccggcctgtattggcttttaatttttaggaagtaacacatggctgtgacctgacaacttcatagtggccgtagggtagggcactgttgtcattattcctgtcactgacaatgtcagccccacctgcagatgtgggagagtagatggggaaagtagtagtggagagtagaggtttcccttaccatccttttaggaagtaggcttttaaacatgatatgtaagtttatttagaagatgaaaattaaagcttgaaatgtaatatgagaggaattggcagcggatgtgagtcagatcctcacctgtcagagcaggaagttagtgaaaactaaagatgattggctggatgcggtggcttatgcctgtaatcccagcactttgggaggctgaggtgggtggatcacctgaggtcaggagtttgagaccagcctggccaacatggtgaaactctgtctctactaaaaatacaaagattagcccagcgtggtggtgggcacctgtaatcccagctactcaggaggctgaggcaggagaatcgtttgaacccaggaagtggaggttgcagtgagctgagattgcatcactgtgctccagcctgggcaacagagtcagactccgtctccaggaaaaaaaaaaaaaaaaagactaaagatgatcaaagattagaattacggaggtgtcctcaagaagaattggaacagatatggttaaaagtggctggaggtgggtgcagtggatatggtggtgcacacctgtaatcccagtgctttgggaggctgaggcaggtggatcacttgagcctaagagttggagaccagcctgggcaacatggcgagacctggtctctacaaaaaatacaaaaattagccgggcatagtagcacatacctgaagtcccagctactcaggaagctgagttgggaggattctttgaccccaggaggttgaggctgcagttagctgttattatatcactgcactccagcctatgtgacagtgtgagaccctatctcaaaaaaaaagtgatgtcgggaggctgagaggatgagtgactggggcaggagatgagtactttcccttttaagcccatagcatttaattccctggtggttcacttcttatttggataactaacaaattatttcaaatgtgtgcctataggtgagagaagcaatggtacatgaggaggtaagcatttgatttgtgggattatgaacaactgtcctactctccttttgattcggtgtctctgtattagtgatctgacaatttaaaaaatcaagcaagagcaggctgggcgcagtggctcatgcctgtaatcccagcactttgggaggccgaggcgggcggatcacttgaggtcaggagttgaagaccagcctggccgacatggtgaaaccctgtccccactaaaaatgcaaaaattatctgggcgtggtggtgggtgcctgtaatgccagctacttgggaggctgagcaggagaatcgctggaacccgggagttggagattgcaatgagccgagattgccccactacactctagcctgggcaacagagtgagactccttgacaggaaaaaaaaaaaaaaaaagcataaagaaaagatgtcagacttgtctgtttggccagtttgagtttatttcagcaggcagggcaggaaggttccttggcttcctagaatcccctggagttggatgggtgtggtggcttacacctgtaatcctaacagaccaaggcccaggtggaaggatcaactgaggccgtgagtttgagattagactgggcaacatggcaggactctgtctctgcaagaaataaaaaaccaggtgtggtggcacgcgcctgttgttccagctactcaggaggctgaggtgtgagatcacttgagcctgagaagttgaggctgcagtgagctgagattgcaccactgcattccagcctgggcaacagagtgagaccctgtttctttaaaaataaaaataaaaataatcccttggatttaaagggagtgggttagtccttgaagatttgattttccagaattcttatcaagaagaagttgaggcgggagaatcatgaggtcaggagttcaagaccagcctggccaacatggtgaaaccccgtctctactaaaagacgtggtggtgcgtgcctgtaaatccagctactcaggaggctgaggcaggagaattgcttgaaccgggacctgggaggcggaggttgcagtgagctgagatcgtgccactgcactccagcctgggctacagagcgagtctccttctcaaaaaaaaaaagaaaagaaaagaaaaaaaggccgggcgcggtggctcatgcctgtaatcccagcactttgggaggccgagttgggcagattgcaagttcaggaaatcgagaccatcctggctaacatggtgaaacccatctctactaaaattacaaaaattagccgggtgtggtggcgcatgcctgtaatcccagctacttgggaggctgaggcaggagaatcgcttgaacccaggaggcggaggttgcagtaagccaagatcgcaccattgtactccagcctgggcaacaagagcgaaactctgtctcaaaaaaaaaaagaagaaagaaaccaaaaaagtagaaaatcatattatcatatactttaatagcacaacaaaattacaaattaataattgtgggtattttagaatatatatgaaacagctatttggtcaaagaggaaataaaaatactacatctgtttaagtaaaaataagtactctgtatcaaatgatcaacatgaatacaaaataccaaagcttgcctaaagcctaggccgggaacgatggctcacgcctgtaatcccagcactttgggaggccaaggtgggcggatcaccaggtcaggagatagagacccgcctggccaacaggccgaaaccctgtctctactaaaaatacaaaaaattagccgggcgtggtggcgggtgtctgtaatcccagctatttgggaggatgaggcaggagaatcgcttgaacccgggaggtggagattgcagtgggccgagatcgtgtcactgcactccagcctgggcgacagagtgagactctgtctcaaaaaaaaaaaaaaaagcctattctgtagacaagtgtgtctcacgttttttgtctcaagaccccttcacactcttaaaagtcactgaagaccctaaacagtttttgttttgttttgttttcccccaagacagagtcttgctctgccgccaggctggagtgcagtggcgtggcctcagctcactgcaacctctgcctcccgggttcaagtgattctcctgcctcagcctcccgagtagctgggattacaggcgcatgccaccacacccggctaatttttgtatttttagtagagacggggtttccccatgttggccaggatggtctcgaactcttgatctcatggtctgcccacctccgcctcccaaagtgctgggattacaagtgtgagccaccgtgcccggctcctaaacagtttttgtttatgtaggtcctatcaatatttggtgtattaggaattaaaacggaaaaaaattaatatattttattaatataatttttcaaaatctattctatgttaatatataggttgagctgtgtctcttcccaaaattgatatgttgaagttctaacccatagtacctcagaccttatttggagacagtgtctttaaagagctgaaatgaggtcattagagtgagccctggtccattatgactgttgtccttataaaaacagaaatttggagacagacaacttgtcacgcatacagggaaaatgacatttgaagacaaagtcagacatctacaagccaaggaatgccagagattgccagcaaaccaccaaaaactaaggaaagggatggaacatatactttcttgtagccctcagaaggaaccaactatgccaacactttgatctcagacttctggcttccacaactgtaacaataaatttatgtcgtttaagccaccccatttgtggtatgttgttaccagagccctcatgactaatacaacatattttttaaaaagcacctactttacgaaaaacagcattttccaaaacagaaatagggagaagagtggcattgtattatattttttcaaatctccttaatgtctggcttcacttaaggcagttgagttcccatagctccatgttcccattgcatctgttacaatatgactcatccagcagcctctggaaaactctattgtatattcctatgaaaatgagagaggaatagcactgggtagtccaggagaatggaaaaacccaaacgacaactaaaacaagcagtaggcaaagaaaccacagaataacaaaacccaaaataagggagagaagacagccaaaaccctggtcagggtgacaggtccatgactcttccaggcaaacccaaataagggagaaagggggtggtaactggggtggggcagggggagggtggtgcctgaaatcccctccttttccagataccgaatgactattccacccataattaaacacccataaaatgagaaatgcaaacaatgttgggtgtgactcaggagccaggagcccccccacacttgtctcccgtgtttcctttcactttgcaatgaaagcttcttgcctttctgcttactctgacttatccctgaattctttcctgtgatggcttcaagaacctggacaccaactggcactggcatccggtgaccttcctgagccctctggcaacaaaagaaaaagccaacatctcattattattatgaatttagttttgaacccaccgatcccttgaaaggatctcaggaacgcccagggctccctgacccacactttaagaactactgcaatagacaaactcctaccttataatcaaggagataaacaagaactagaaaagaaaaaaaaaataggctgggcaccgtttttgtaattccagcactttgggaggccaaggcggatggactgcttgaaatcaggagctcaagaccatcctaggcaacatcacaaaaccctgtctctacaaaaaatacaaaaattagccaggcatggtagcatgaggctgaggtgggagaatcccttgagcccaagaggttgaagctgcagtgagctgtgatcacaccactgctctccagagtgggcaacaggtgagaccctgtctcaaaaaaaaaaaaaaaaaaaggaaagaggaaataataggacatcaaaatcacagattccacaccattagaactaggaggaaagctgagcccagtgactggctccaaaatgaatacacagggccgggtgcagtggcgcattcctgtaatcccagcactttcagaggctgaggcagataagattgctttgagctctggagttcaagaccagcctgggcaacatggcaaaatccagtctctacaaaaattggcccagtgtggtggctctcacctgtgctcccagctactcaggaggctaaggatgcaggatcacttgagcctgggaagtggaggttacaatgagccaagattgcagcactgcattccagcttggacaacagagtgagaccctgtctcaaaaaacaaataaacaacaaaaaaagaacacacaggtttcccctaaagagaatagatctttgcacacctgcccctacctctccaacactggtggccactgtgcaggggaaggcaatagatcctcctagtaccttctctgcctacagagaaggggatgctgcctgggagctttttgggactcccaatagaagacagatttagtctcctggaaggctgcctgatccagttcccacagcagctgccacttgctcaggtgagtgaagacatctgtcaaaagtcagaattttatttttattttattttatttttgagatggagtctcactctgtcgcccaggctggagtgcagtggcgcaatctcagctaatcgcaacctccgcctcccagtttcaagcgattctcctgcctcagcctcctgagtatctgggattacaggtgcccgccaccacacctggctaatttttgtatttgtattagagacaaggtttcaccatgttggccagggtggtctcaaactcctgacctcaggtgatccacccacctcagcctcccaaagtgctgggattcactcacaggcgtgagccaccacacccagccaaaagacagaattttaacaaatttggttaaagatcgaattggcttttatttgtgattcatgaatctgggcagcctccactctgcaaaacggaatgagagctcccacggggcaaatggtagaatagtggtttttgtaagatagagaaaaggctaattagttaacactaggttacttttcttgtaaggattaaagcagaggggacttccttattatgctgctcaggtagactggaaatctggtttgtttagggatctacctgcttaaagtatcagtctgattatgtggcatttagcctaagtgactctgtcttggtttggtctggtctcatgaggcctagagcaggagctcagtccaaaaccatgtcctctcataattttgtgtaacttgcctaacacctgctccttctcaggaacgaggcccagcaaaaagcagagacggtacagggccagaaggatctgagagagtgtggccagcttgagccctcaggagtcggccagaaggatctgagagagtgtggccagcttgagcccctcgggagtcagctcctccgtccccactggtaacgtcttcaccccttcaacacggtgtgaagggccatgtcatggttgatcttcagtccctcagactacaccatcagccccatgggggtgagcaaataacaagtaactatactgttccctgctatgtgtctggctcttggtaaaatttaaaaaagttaaaaattgttgtggtttgaatgcaacatttttgaatggaaatctgcttccccatttttcttttttaataactttttattttttttttgagacggagtcttgctctgtcacccaggctggagtgcagtggcctgacctcggctcacggcaacctccgcctcccaggttcaagcgattctcctgcctcagcctcccgagaagctgggactacaggtgcccgccaccacgccgggctaatttttgtatttttagtagagacggggtttcaccatattggccaggttggtctcgagctcctgacatcgtgatccacccgcctcgacttcccaaagtgctgggattataggcgttagccaccgcgcccgacctttaataaacattttaatggactacaacagacccacagaaaaagacacatcacaaagtgaacacccacagggagaagcaatagggctgtcagaggcattcgacccagagcgactccattttgagtgagggctaggaaaatgaggctgggctgcattcccagaaaagtaggtattcctaacctctagatgtttacggttaagggaacaaattaataatgggtactaaaacagacccagacttgggagtgtccagatatcccggtatctagagaacaaaggcattcctaattttgctttaaaaataatatcgattcttgaaaaatacagtaagaaaattaatcctttttcacaaacccttgtagcagagcacatctccccaaaatctatttttagcccaaatatacacaagcattgtacctagggtgcatacgttcctcttactttcaggaacgtcctactgtctatggggtagctgtttcacaactttactttctcaacaaacttgcttttactttgcactgcggactcgccctgaattttttcttgcgcgagatccaagaaccctcccttggggtctgaatcggacccctttcctgtaacacaaccaccgctcccagcctccccgcttccagccgctaagcccaaagtcttttatatgaacaaacctctaactcgtcctgtgactttgatgcgtgtgcgttttaggcaccggggagcagagggtaaagcggcgcagctccgggcctcctcccgcgcaagttcccgagaagagcaggtccggcccgcgcagacgtgcacggtccccagccattaggaggagcagacggtccccacccccacaatcagtcatctctcggggtccgcccttgcttcctgcccacgagtgaggcctctggttgcccgcaacctaaggggcatcgcagccccgagcaacaccgcccccaccagccttagctgagtgctcccattggccagaggccagcgggtgggggctcccattggccatcggccataatgcttccattggtcgaaggccagaccagcggagactcccattggccgagggctgtggttcgccgcacggcctactgggagttgtagtcgccgcgtcgccggtgcggccgccattgtccggcgttcggcgagtcgggtggtccctttggctggagtgcctctctggtctggggatcacctcaggcgctgtccttcactgggcgatccagcatggaccccgaggacgaaggggtagcgggagtgatgtctgtggggccgccggcggcccggcttcaggtaacaataacaacaataacgacggcggcgggctccgggcaagcgtctcccgcgcagactgaccctttcacctcgcggcgcgatgagagcggcaccgctgttaatgcccttgacacgtggggaaactcagacgcgggtcggggcgtggtgaccgtcctggctggtcagagagggggccgggattccaaccaggcgcctggcccccgaatgcgcatgctccacgcggctctgtcctccccagggctggggtcggtcattcccgagagaatcgagcaggcccatctcctgcgttctgctccgccccgccgacacccttgcccattccaggaaggtctgtcctcgtgttgactgataacagtaattgtagcgttggccgggtgcccagatggcaagaatcatcgaatagagatgctttaacgcgtggagtcagcggacacccaccgggaccccagcaccgcggagcccctgccctggggcttgggcacaacctcttgggggcaatgatgggtcaccacgcactgagtgtgatgagagtgaccaccagggtcgtcccctgcgagactgtgggagaactgcagtgcagggcggtcagtgtttgcagggccatctggccatcagagctccactttctagacaaagtggttgcggcctgtgttctccataaagctgcctcgcgtggcaggaaacaacaataattatccttcctcaagctctgcaactttgaaattatacttttttttattttttgtcgttggtttgttcatggggatttgcattatttcagatttggtacacaaagtgagacttgataatcttaggttgcaggttttcagatgtgtgttgctccaaatttgcatgaaatgctaccacgttttattttgttcttgctgtggatgggggacaaggaatgagtcgtaagaaaggcttgagagaaagtgtattagttacctgttgctgtgtaactcaaaacttcgtgacctggaacaacaataaatatctcacgagttctgacaggagtaatggaatgtcctagctggtggttctggttcaggcccatgaagttacagtgaagatgtcagcatagctgttgtcacctgagacctgagtctggaggatccacctccaggatggctcactcacatgtctgttgataggagacctcagttgttctccatgtaggcctctctttggaactgctagggatccttgcaacatggcatctggcttcccacagaacaagtgatccaggagagggcaaggtagaaactgtaacaccttccatgacctggattcagaattcacactcttgtcacttccacggtgtcttactggttacaaagtcaaccttgttgagtgttggaggggaccacaccagggctggaggtcattggcagaggtggtgggggagcatcttggagactgtccatcacaggagacaaggaccagaatggagagcttcaaggtccagtgttttatctggttatctgtgtctgctgtaacaattcactacaaattttgtggcttaaaacatttgttcttaggttctggaggtcagaagtctgaaatcggttttctggtctggaatcaaggtatgagcagagctaccctccctaccaaggttctagggtagaatgtttcctcgtcttttccagctgtgagaggtacagaccttctattccttgcctcatggccctttgcctgtcttcaaagcctgcattgtagcatgttgcttcagtgatcatattgccttatgtcttctatagtcatagctccctttgtctacctcttataaagacacttgtgattgcatttagggcccacctggataatccaggataatttttctgtttgaaaatcctaatcacatctgcacagttccttttaccatatatagtaatattcacaggttctaggaactaggacctggatatccttggaggccattatatatctcagtctaccatagccaggctgagaggagccatccagtattcagtgatgagaaggagccattcacgtgttttaagcaggactggcatagggttgaaaaaatccacttatgcattaggggctggtgggaagggagatactggcagctcaactaaggcagtgggaaaaagagaggagtggttaggcccagtgaccaggtgttggctgatgctggggtgaaaagaatatgtaaaggagaaacatcagagcacagccccaccccttcaggctccagaagtgcaagacaagagggaaggctgcagggatctgatgtagggcagaaagaacatcatgagacaacaaggagtgggcttctgctagaattccaagaaggaagccaagaggaggcatgaaggacttgtatgatgccactgagaattctcatggcttggacagaccagtactcagtggacgtggtgtctaggctgtcaccagtgactcttgcagaatgggtgatgatgggaggtgggggcaggaggcacgggaagcacaaatcaaaattggtgggcattctgagtggaggaaagcgaagacacagagacaggagcagagacctcagttcccaaccaaaggcatctttctgtatgtttcctattagagccacctgctacctgtactaaaatttctttcttattttttaatctactcatgtttttcttaaaaggaaatgtccttttaaaattgaagtatttggggcctggtgcagtggctcatgcctgtaatcccagcactttgagaggccacagcagatggatcacttcaggttaggagttcaagaccagcctggccaacgtggtgcaaccccatctctactaaaagtacaaaaattagctgggtttggtggcacatgcctgtaatcccagttatttgggaagctgaggtgggagaatcacatgaaccagggagatggaggtcgcagtgaaccgagattgcaccactgcactgcagcctggtcaacagagtgaggccctgtctcaaaataaaaaataaaaaaattgaagtatttagtatatgtggttttgttttgttttttaacctagcagcaacactggtggtgtatagttttgatttttcatttccctgatgactaatgatgttgaacatcttttcatgtacttatttgccatttgtgtatcttcttttatatattcttcaaagaaataactatacagattctttgcctattttaactgggttgtctttttattactgagttgtatgtgttcattacatattctagatacaagtctcttatcagatatgtgattcccaattattatctcccattctgtgagttgtcttttcactttcttgctaatgtcctttgaactacaaaagtttttgttttgatgaagtccaattgattacatttagttgcttatccttttggtttcatatctaagaatcccttgccaaatccaaggttacaaagatttatctctctgttttcctctaagagttttatagttttagctcttacttttaatttaatttaatttttttttttttgagatggagtctcactgtgtcgcccaggctggagtgcaatggcatgatctcggctcactgcaacctctgcctcctgggttcaagcaattctcctgcctcagcctcccaagtagctgggactacaggagcacgctgccacgcccggctaatttttgatattttagtagagatggtgtttcaccatgttgcccaggctagtcacgaactcctgagctcaggcaatccactcgtctcagcctcccaaagtgctgggattacaggcgtgagccactgcgcccagcctcttacatttatggctttgtttctattttattttatttcttttttttctcttcttttttttttctttgagacaggatgtcactctggttgcttaggctggagtgcggtggcatgatcttggcttgctgcaacctccactttccagactcaagcactcctcctacatcagcctcccaagtagctgggactacaggcagcctggctaatttttttcaaattttttttgtagaggcagggttttaccatgttgcccaggccagtcttgatctcctggactcgagtgatctgcctgcctcagcctcacaaagtgctgggattacaagcatgagccactctgcccagccagcctaatttgttttgagttaatttttatatatgatataagatagaagtctgtgttagtttgaatgtgtctcccaaatttcatgtgttgatagtatttgaaggtggcgacttttgggagaaatttaggattagataaggttatcaggattggactcccttgatgggactagtggctttagaaggagagagagacctgagctggcacactcttgccctctcgccatgtgatgccctccaccatcttatgtcataacaagaaggccctcaccagatgccagtaccatgatattagacttcccagccttcagaactgtaagaaataaactcttttttttttttttttttgagtcggagtctcactctgttgcccaggctggagtgcagtggcgcaatcttgactcactgcaagctctgcctcccgggttcacaccattctcctgcctcagcctcccatgtagctggaactacagacgcccaccaccacgctcggctaattttttgtatttttagtagagacagggtttcatcgtgttagccaggatggtctcgatctcctgacctcgtgatctgcccgcctcggcctcccaaagtgctgggattacaggcatgagccaccgctcccagcccacaaataaactgtcttcatcaaagttattgaaagagagagagagaaaaaaagcaactttctttataaattacttcgtccttaggaggacaaggcgagaggatcacttgaggtcaggagttcgacaccagcctggccaacatggagaaaccctgtctctactaaaaaatacaaaaattagctgggtgtggtggcgtgcacctgtagtcctagctactcaggaggctgagccaggagaatcaactgaatccgggaggcagaggttgcagtgagccaagattgtgccactgcactccagcctgattgacagagtgagactcccatctcgagaaaaaaaaaataataaattattcagtctgtgatattctgttacagcaacagaaaatatgctgggacagggactatctttactcttttccatgtggctatccagatgtcctgtaggaagtgtttgtaaaccacttaatcattatacagcccccaaggggtgatgctttgttgacatggaaactgggaagcaaagatgcttcttggggacgaagtgactgagccaagactctgatccagaaatatctggctttcaagcatggctgcagaagggctttgtttatgggacacattttaggtaatgttgcatcaacttataaaaatcagaatttttcacgtaaaggccaggcgcggcggctcccgcctgtaatcccagcactttgggaggccgaggcgggtggatcacttgaggctaggggttcgagaccaacctggccaacatggtaaaaccccatctctactaaaaatacaaaaattagccgggcgtggtggtgcgctcctgtagtcccagctactacggaggctggggcaggagaatcacttgaacctgggaggcagaggttgcagtaagtggaggtggcaccactgcactccagcctgggtgacagagcaagactctacctcaaaaagaaaaataatttttcacataaaaatctgacctaattttcagcttctcttcagagatgagcagttctgacaaagggacctgtattttcccgtaatcagtgagttctgagtccctgctgctccttcagacagggtccatgctccccatcacctccagtcccaccactcataggtaagtgtccttgtgggctcttaaactggcccacttctgtcatgtgagcctgccttgccctgaaagcaggcgaatttctgaccccagccctgtgtgcttctcttttcaggaaggatggtgaacctgtttttttgttttttttttttgagatggagtctcactctgtcgcctcagctggagtgcagtggtgtcttggctcactgcaacctccacctcctgggctcaagcgattctgctgcctcagcttcccaagtagctgggattacaggcatgtggcccagccaatttcactttgtatctaagtattagtgagtgtattagttagctgctgtgtaacactgtcctaaaacagtatctgttttacttaaaacagtaactgtttctttagctcacaaacctgcaaataagtggtttaggccagtctctgctggtaccctcgtctgtcttgttagatgtaggtcagctctgcctggcgttgttgatcttggtgagtcctctcacatgtcctcactgtacaacccacacctatgtgtagtggcctaataggtgcccagtgagacctgactcccatcattcataacgtgcagtctctcgtgacacaggcctgcctgttttctccttttccattcttcctctgccagaaagcactgatggagatagtccagctgattgagaatgtgtgtgatgtttcaggaaccagtgaccttccgggatgtggctgtggactttacccaggaggaatgggggcagctggaccctacccagaggatcctctaccgtgacgtgatgctggagacctttggtcacctgctctccataggtaagccctgcttcgcaaggtgtgatagctgattctctctgggttataagtcatggggcctctggtgtgaggacctgaccttgggtcctcactccctatggggagtgcatgaagagggaggtctgcccttttccatcaccatgcagagcttcaccatgttgtgaggtgcccacgtgtcctcacagtcgggagtctggtctggagcctgggcttgttgtttctctcctgagcagcccctcacctcctgtgtttttccccatttccaggtcctgagcttccgaagcctgaagtcatctcccagctggagcaagggaccgagctatgggtggctgagagaggaaccacccagggctgccatccaggtgagaacccactatgtgggagcagctaatgggagcagcctagcaggtcactggagatgcacttcatggaaagggtggtggttggtggtcctgaagaccaccccattcactaggagtatacaggactcagcatagagtcatgctgacagctctcagtataatgagaccaacaaaggggaaaggcgcgtggggataagttcagaggaagccaggcatgagcctccagagtcccctcactgtggagtcattcaggatgtgccaggctcccccagcactcaggtgtgacacctcatgagacatgagctctaccagggaatcttgttaagagactcagtgctaggagttttgactgaggctgccacatagacactctctgcctagcacagaccaaggttccagactaccaggagaaagccagtgtttggaataaaccacatagtgtgtgcagtgtgggtgtagtaaaccactctcatcagttagggttgtgggaaccatccccaaatccaaattctcagttgcagccaaaggctaaccttgtgaataggcttctcctaagaatgctggtttcaggcctgccctgttaaatcttttctgcacagtgctccatagccttctcacctgtgctccccatcttctaagctcagaggtcatcacctgtgctccagtgctgagaatcccaccccttcctccctctctgcttcatcttcccttataggttccaggtcattccctctctcaccatccttctcagcatgtcctttctgtggcatcatttctaatatgtgaacctgcccttcatcttctccatttcattcttgcatgtccagattctttgtgttttgttttgtttttaagacagggtctcactctatcgcctaggctggagtgcagtggcgtaatcacggttcactgcagccttgacctccctagttcaaatgatcctcccacctcaccctcccgagtagctgggattacagacatgcaccaccacgccctggtaatttttgtatttttagtagagatgggattttgccatcttgccaggctgggctcgaactcctgggctcaagcaatccacctactttggcctcccaaagtgctgggactacaggcgtgagccaccatgcccagcttttttttttttttttttgagaccgtctctgttgcataagctggagtggcagcagtgtgatcatggctcagtgcagcctcagccttcctgtcacaaatgatcctcctgcttcagcctcttgagtagctgggactacaggtgtgtacccccacacctggctaattttctttttaaatttttttgtagagacacagttgcactgtgttgcccaggctggtctcaaactcctgggctcaagcaatcctcctgtcttggcctctcaaagtgctgggattacaggtatcagccactgcacctggcctttttttttttttttttttttttgagacagtctcactccgttgcacaggctggagtacagttgcattatcttagtctcctaggctcaagtgttccacctacctcagtctccctagtagctgttactacaggtgtgtaccaccatgtccagctgatttttttgatttttttctttttcttttttaaaaattattttactttttttctttttttttctttctttcttccttttttttttttttttagagatggggtctcgccatcttgtccaggctgcaggctgctcaaactaactcctgggctcaagcaatcctgcctcaacctcctaagtgctgggattataggcgtaagccactatgcctgactttttgtttgtttgtgtgtccttttttttttttttttaatagagatgagatctttctacactgcccaggctggtctcaaactcctgagctcaaacagtcctcctgcctcagccactgaaagtgctgggattacaggtgtgagccactgtacctggtcacatgtctagattctgtaaacttgttccccacacccttctttattctcttatgaggaagaattgtgtttagctataaataccctaaaaccaggttggagcagctcaaaataaagaagcatttttcttgtaaaacaggagccctgagtctgctggtactgtcttggcatctcagaggtgccagggctgattgttctgtgattttcccaggctgtccttgggattacagtgcagctgcagcagctccagccatcacagttgtgctccatgcaggaaggaggggaagaggtaggaagaattctgccagccacatctgtccccttttggcagaactctagatgtcacctgctggggtctctttagccagaactaggtcacctcctcttgcactgaccctagttgctagagaggctggaaagctaggggtgtctagattgtcataattggcttgggcgagtcatggtccccttgctgtggcttgtgtgttggtaccctgaccacattctagagtaaatagcatctggccatgggatgtacaaccagcaatgcctgcagattagcctcccacccaaatacttctgatgccacccagggctttctgattctgcagaaaaacacatatgcccccatgatagcgtatgacctatcaactgggagtcgggtgaatctgctgcagaccctgttttcctgcccctttcatcggttgtcactgctgttacttcagacatgtatgtcggaagcaaattctcatcaccctggacatatgcctgtcactcacaagtcttatgccataaccaaatccaggatctaaaacgtgtgcccataaatactaagcaaaatgttgtgcttgcatggattaggagtatggggtcaaaatcatgatggacagtttcaataacttaatacctagacagttataaatactccagaagcagaaggttttcaaggctttatgttaagacagaaacatattttccatgtaatgctttgtattagtttcctgttgctcctgtaacaaagtaccacaatctaggtggcttgaaaaagcaccgatttggctggacgcagtggctcacccctatcattccagcactttgggaggccagggcagacggatcacttgagtccaggagttcgagactagcctggccaacatggcacaacaccgtttctactaaaaatacaaaaattatccaggtgtggtggtgcatgcctgtaatcccagctactcaggaggctgaggcacaagaatctcttaaacccaggaggtggaggttgcagtgagctgagatcatgccactgcactccagcctgggcgacagagcaaaactctgtctcaaagaaaaaaaaaaaaaaaaaggacagatttattttcttatagttgtggaggtcagaagttcaaaatggttcatcagggctagttcctctgacggcgcccagagagaatgcatttctgtctttctcagcagctggaggctgcccagactccttggttcatagacccttcctccatcttcagagtgcttcactctgacccatttccattatcacaaccgcttccctgactcagacccttctgcttccctcctatatggactctttggtcagatttagggccccaggataatctcccatttcaagattctttttttttttttgagacagagtctcgctctgtcacaaggctggagtgcagtggtgtgatctcggctcactgcagcctccgccttcccaggttcaagcgatcctcctgcctccacctcccaagtagctgagactacaggccgtgccaccatgcccagctaattttttgtatttttagtagagatgggatttcaccatgttggccaggatggtctcaatctcttgaccttgtgatccgcccgcctcagcctcccaaagtgctgggattaaaggcgtgagccaccgcgcctggcccatttcaagattctttttttttttttttttttttttgagacggagtctcgctctcttccccagactggactgcagtggcgcaatctcggctcattgcaagctccgcctcccgggttcacgccattctgccttagcctcccgagtagctgggactacaggtgcccgccactgcacccggctaattttttttttgtatttttagtagagacggggtttcaccgtgttggccaggatggtctctatctcctgacctcgtgatccgcccgccttggcctcccaaagtgctgggattacagacgtgagccaccgcgcccggccatcaagattcttaatcacagctacaatatcccttttgccacataaggttccagggattgggatggggacatctttgaggggccgttattcagcataccacatgattaaaatagagagtaaattttttttttattatttttaaggaaaagaagcctagtcaatagaagaagaccgcgtctctacaaaaaaatttaaaaattacctggcatggtggtgtgttcttgtagtcctagctacttaggaggctgagcggggaggattgcttaagcccaggagttcaaggctacagtgagctacaatttgcaccactgcactccaggctgagcaacagagcattaaaaaataaaggaaaagaggccaggcatggtggcttacgcctgtaatcccagaattttgggaggccgaggcgggtggttcgcttgagtccaagagttcaagaccagcctgggcaacctggcaaaaccacatctctacaaaaaatgcaaaaaaattagctgggtgtggtggtgcatgcctgtggtctcagctgttcaggaggctgagcccaggaggttgcagtgagctgagatcatgccactgcacttcagtctgggtgacagagtaagaccttatttcaaatataaaataaaataatggtgaagaatccctgtccaggcagatcccactcccagtgcactcacaggggtttgtgggctcagggatggctgggcgatctcaagcccctccttggcccctgtcactcgtctggcatcattccttactggttccctcttgcggttgctcagcttcacctgctgcaggtcacctcctggctgactacagtcccagctcttctcccatttcctctcttcatcaactgctcaccctctctctcggagactccatggcttcccatgtgccaggatcagtgagttgttctgggcagccaggagtcaggctggagttggagcctgtctcaacctcagtgctctttgctgttcctggccaggccagttcactagtgttctcaagtccccctcctccggatgttcttccgcactctcccagcaggcagcgttagtcttggctggggtcacagtgttgtctttagtctctgtgttttcgtccgtgttgtctctcaggcagtctcccagctcacgagcctgttccatggatgttcctgaggacctgccatgtgctgctgtttgtgctgtggatgcagcaaagaatgacaggaaaggctgagccctcactcagcatctgggagatggaagtcttgagagatggatgccagtgccaggcagtgatgaggccgtaaaggaaatgcacctggggagggcaagatggggtgctcatgccccgggactggcagggaggcctctctgagaaagtgactcaaactggggcacagggagcaaggtgggcagatgtctggggatgagggttcttggcagagggagcagcaggtgcaaagggccccaggaaggagtatgggggatgcattagagggatgtgaggagccatgtggagcagagtgggcgtggggcaagagtcaggaggtgagacgagccagggcatggtggagaagggcacagggtcgtgtccatcctcagaagtgactgcagagtgaatggaggagtgaccagggctggcttgcagtggggaggagggtgggtctgtttggttttgcataatagctttatcaagataaaattgacataccataagttcacctattaaaatgtaccactcagcggttttgagtatattctcagattgtgtgcagctatctttactatctaactccagaacatttcatcaccatcttagtcagcttggggtaccgtgacaaaataccaccgcctgggtgtcttgtacaacagacatttatttctcacggttctgtaggctggaattctaagagcacagtgccagctgattcgggccctggtaagggccccttcctcaattgcagaaggccgccttctctctgtgcccttatatggcagagagaggaagcaagccctgtggtatttcttcttataagatcactaatctcattcttaaaggccccaccctcgtgacctaatcacctcccaaaggcctcatctccaaataccctcacaatggggattagggtttcaacataggaattttgctatcgacattcagtccatagcagtcactctccgtctttcccatcccctgccaaccagtaacctactttctctctctatggatttgcctgttctagatattccatacgaatggaatcttacaatttgtgacctttgtatctggcttctttcactcagcagaatgttttccggcttatccatgttgtagcgtatgtcagtactttgttcttttttgtggctgcataatatcccgtcgtatggatagaccatattttgtttatgcatttgttgaggggcatttgggttgtttctacttttggctattaattaatagtgccactatgaacattagtgtataaatttttgtgtgaagtgacttatattttagaataaacctctgggtgctatgtagagagtcagtttttttttttttttgagacagagtctctgcttggtcgccgaggcgggagtgcagtggtgtgattttggctcactgcaaccttcgcctcccaggttcaagcgattctcatgccttaggctcctgagtggctgggactacaggtgtataacaccacacccgaataatttttgtatttttagtagagacagggttggccaggctggtcttgaactcctgacctcaagtgatcctccagcctcggcttcccaaagtgctaggattacaggcatgagccaccgggcctagccagagagtcatatttgggggccagaggtgacagagcaggaagcctggcacctggccagcctcagctcctccattatctctcccgttgtcaagctctcattcattcattccctcgatacgttccttcagcattcactgagagatatttttgagcttctactacttgtcatttctaggcactggctgtgaacattctagtgcggtgaggtgtacccagaatgaatgaacacatgacctgtattttggtcaggacaagagcagatgagggggcttgaagagggcttggggaaagcgggaagcctggcttataacagagtccctgtcctaatccccagaactggttatcttggatactgggtgagcaagagggtcagaatcagacaaggagatgtgacagcagaagcagaggtgagtgagagagatctgaagatgctgtgctcagctctagaggtgaaggaaagggccaggaatgcaggcagcctctaggaacgggaagatgcaaggattttccccagaacctcccgaagagaaaccagccctgccaacaccttgattttaggacttctgtgttccagaactataagataataagtgtgttttaagttacagcagcaaacagggaactcatataccttgacttcattgccagtgcatggcccacagcaggtgctcaataaatgtttgttgaatgagtggagccgtgtctgagggcacttgatgttaaaataagaggagaatcaggggacttgccagggcagctggttaggaccccatttcaatatcaggcctatggtgttggaggcctgtcccccttccgtttttttctcccaacagctcagagatctttgggttttctttcagcctgggagcctcgatctgaaagccaagcatcacgcaaggaagagggcctgcctgaagaggagccatcccatgtcacgggaagggaaggattcccgacagatgctccttatcccaccacgttagggaaagacagggagtgtcagagccagagtctggcactcaaggagcagaataacttgaagcagttggaatttggcctcaaggaagcaccagttcaagatcaaggctacaaaactctcagactcagggaaaactgcgtcctgagttcaagcccaaatccattcccagagatctctagaggggagtatttgtatacttacgactcacagattacagactcagaacataactccagcttagtcagtcagcagacaggctccccaggaaaacagcccggtgaaaacagtgactgtcacagagattccagtcaggccattccaattacggaactcacaaaaagccaggtgcaggacaaaccctacaaatgtactgactgtgggaagtcgtttaaccataacgcacacctcaccgtgcacaagaggattcatacgggagaaagaccttatatgtgcaaggagtgtgggaaagccttcagccagaactcctccctcgtccagcatgagcgcatccacactggagacaagccctacaagtgtgccgaatgtgggaagtctttctgccatagtacacaccttaccgtccatcggaggattcacactggggagaagccctatgagtgtcaggactgtgggagggccttcaaccagaactcctccctggggcggcacaagaggacacacactggggagaagccatacacctgcagtgtgtgtgggaaatccttctctcggaccacttgccttttcctgcacctgagaactcacaccgaggagaggccctacgagtgtaaccactgcgggaagggcttcaggcacagctcatccctggcccagcaccagcggaagcacgcgggggagaagccctttgagtgccgccagaggctgatctttgagcagacgccagctctcacaaagcatgaatggacagaagccctgggctgtgacccacctttgagtcaagatgagaggactcaccgaagcgacagacccttcaaatgtaatcagtgtgggaagtgtttcattcagagctctcacctcatccggcaccagataactcacaccagagaggagcagccccatgggcgaagccggcggcgtgaacaatcctcgagcaggaactcacacctggttcagcatcaacacccgaactccagaaagagctctgcaggcggagcaaaggcagggcagccggaaagcagagccctggctttgtttgacatccaaaaaatcatgcaagagaaaaaccctgtgcacgttattggggtggaagagccttctgtgggtgcttccatgttatttgacatcagagaatccacataggagagaaactttgctgatgacttttaaccacaagtaaaaaatgtggtaagtccacatagtgtactcatggaaggaggggctgggggtagaaatgtcatgggtgacttctgactttctaaggaaatgatgcttcccaagcacccgaggttggttggtcccaaatctatcaaactcagtgccctctttagcgacatattttgtgacattccttccattacaccacagtgagttcacaggtaatataacctacccacctgtgtaatgtcaaaaaaaatcaatatgcggccccattttgtaaaggatcattaaaatgaaagtaatttatggtagagtaaattgtagagtaacgtgtactgacttggtgcagtatttctccttgtcactgtgggcccaattttgccaggagacctagggcaatagcctgttgcttgtggactggtagagggtatgatgttgaccatggcaatactgtgaggggccttcccatgtggaacgtgaccttccaaagtagtgactaactcttggaaaagtttttaacaacataatatgctattgcatttctgggaaattctgggtaaattccaagcatgcagcaattagtttgtgcttatgtgtgaagtccagttaggttctcagttcataccctgaaaactgcttattccacatctgttgatgtggtccactgggggcagttctgttcctcaccatcttggcagcatgcatggctcctgcccacatttcaaccacacccccaacccaattacgtgaccagcccccacgaaatttcacagcattccgtgcaggggagtgtcacagctcctcttgaaaaacatctggtgttgctatgagccagaagttcttttttttgttttttgtctgagatggagtctcgctccgtcacccaggctggagtgcaatggcgcagtctgctcaccacaacctccgcctcccaggttaaagcaattctcctgccttagtcccccgagtagctgggattacacgcacctgccaccacgcccagctaatttttgtatttttggtagaaatggggtgttggccaggctgatctcaaactcctgacctcgtgatccacccacctcggcctcccaaagtgctgggtttacaggcatgagccactatgcccagctgagccagaggttcttaactggtggtgcttttgcctccagggcacatttggtgacatctagggacatttttggttgctgtgcctggaggaagggtgccgccgtcatgtagtgggtagaggccagggacgctgctcaacatcctttagtgcccgggacagctcctcaacaaaggattctctagctcaaatgtcaatagtgccaaggtggagaagccacctgggtataaacccagcccagaaatgtagctgacatttttaaaacttgcagccagctgtggtggctcacgcttgtgatcccagcactgtgggaggctgaggagggcggatcctttgaggtcaggagtttgagactagcctgggcccatggcgaaaccccatctctactaaaaatacacaaattagccaagtgtggtgacatgcgcctgtaattctagctacctgggggaggctgaggcacgagaatcgcttgaacctgggaggcagaggtttcagtgaaccgagattgcaccactgcactccagcctgggtgacagagcaagactctgtctcagaaaaaaaaaagaaaagaaaaaaaaccttcaaattgattaatcagggctggactagactagaaatcatataagcttgattttaacagatggcatcattagctagtttatacatgatgtactttttagtacatcctttacggttttgcagcattcataattgatgtgaaataaggaagataatcctttttttttttttgagacagagtctcactcttttgcccaggctggagtcagtgttgtaatcactgctcacttggcagcctcgacctcctgggctcaagtgatcctcccaccccagcctcccaagtagctgggaccacaggcatgtgccaccattcctgattttttttattttttgcagagacagggtctcactgtgttgcctaggctggtctcgaaccttggcgtcccaaagtgttgagattataggcatgagccactgtgcccagccacttatttttctgagtaacctttaaggatgtattgtggacattttcaaacatgagtcatatatttttgctggtactcccatctacctccccaccattctccttccctggatatatatataaccatgtttgtccactgggacaaaaccattttcacaatcatactaagctgtcatttcacatttttgctgtgcactgatagtgtgaaagcaatggcaggtaaaactgctgagcctgagttcaaagcagggcagtagccctgaggttggttgttcatattcttctccactgggaaatgcagtaaagaaaaagaaaagctaatttcacttaatttcttttcttttcttttttttttttttcttttgagacggagtctcgctctgtcgcccaggctggagtgcaatggcgtgatctcggctcactgcaacctccacctccacggttcacgccattctcctgcctcagcctcccgagtagctgggactacaggtgtgcgccatcttgcccagctacttttttgtatttttagtagagatggggtttcaccatgttagacaggatggtgtcgatcttctgacctcataatccgcccacctcggcctcccaaagtgctgggattacaggcatgagccactgcgcctggccctctttttctttttgagatggagtattgctctgtcgcccaggctggagtgcagtggcacaatcttggctcactgcaacctccgcctcccgggttcaagcagttctcatgcttcagccctctaagtagctgggatgacaggtgtgcgctaccacacccggctaatttttgtatttttagtagagatggggttttaccatgttggccaggctggtctcaaactcatgacctcaagtaatctgcccgcctcagtctcccaaaatgctggcattacaggcatgagccaccgtgcctggcctactttcactgaatttctgtgatgaaacgggaaaaattaattttgttaaatctcaagtagaactatattgtcattatcacatctaaacagatatcatcaaatacctagtgttcagatgttctgggttgcctcataaattttgttttctatttgtttcatagtaatcataatctaaacaagatccacacagtgcatttggttggaatttttcttttttctttttcttttttttttttgtgatggagacttgctctgtcacgtggttcactgcaacctcccaggttcaagcaattctcctgcctcagccgcccctgtagctgggactgcaggcatgcaccaccacactcagcagatttcttaattgtttgtagagatggggttttactacattgcctaggccagtttcaaactgggctcaagcgatcctcccaccttggccatccaaagtgctaggattacaggtgtgagccaatgcaccctgccaaacagcaattttttttttttttgagacagagtctcgctgtgtcacccaggctggagtgcagtggtgcgatctcggctcactgcaagctccgcctcccaggttcatgccattctcctgcctcagcctcccgagtagctgggactacaggcgcccgccaccacgcccggcaaattttttgcgtttttagtagagacggggtttcaccctgttagccaggatggtctcaatctcctgacctcgtgatccacctgcctcggcctcccaaagtgctggggttacaggagtgagccaccgcgcctggccccaaaacagcaatttgaataaccatgttggaatggttgagcattggaacgcattagcatcagaacttcccgtgtcaggccaggcgcggtggctcacgcctgtaatcccagcactttcggaggccgagatgggcagatcacgaggtcaggagatcgagaccagcctggctaacacggtgaaaccctgtctctactaaaaatacaaaaaattagcctggcgtggtggcgggcgcctgtagtcccagctactcgggaggctgaggcgggagaatggcgtgaacctgggaggcagagcttgcagtgagctgagatagtgcctctgcactccagcctgggtgacagagctagactccatctcgaaaaaaataaaagaacttcccgtgtccgtttttgctttttggatgctgggagtgtcacaactcagctatccaatcaaggcagagctggcctccaggatgccagagccagagctttgtggttcatctctagaggttcaacaggaccctgtggatggcccaagttcgtttctctgcacttacctcttcggggttgtcctcaaaacgttgccgtgtcagctctcacttttcacagcaactctggcctcctaccttggactgcgccacttctgtctccttagataacctccattcgcatagctaaatgctgcaccctccgacactgccacaataatagttctgtgagttagtaccattttatagataggcaaaatttggcacaggacaaaagttagtggtaactagaacaaaagtaaccagcccaagctaggaagtggtggagttagaatttgatgtcagcacccagctgaccatggcttaaacagatgaggctttgttcaaaggctgtcttttcagtggctcagctgtgtcacagtcgatgttttctgcaatctctcaacctttccattgtggtcatgaggagactcctatggctccagccattgcatccacagtgaagactgaaagaagggggaatgggcaggccaacacttaccgctgatggtgtttaaaggaaaaacattcccagaagcctgcagcacatgccccccttagtctcactggccacagatgggtcagggggccacccctaataacaacggggcttagaaacctcgtatttacctttctaacctctgtggtggagacaggtgggagagaaaagtcctgggaagtggatgatggaggcagctagccgtagctgctgcttttctcttcaagctcttgggagaattgcttgtgctccctattcccttggtggatgatggaggcagctagccgtatctgctgcttttctccttcaagctcttgggagaatcgcttgtgctccctattcccttggtggcagctcacacctcagacctgctgtccgcccccactgcttcacagaacccactgcaaccactgtccaaggtactacctctggtgtcgtctctcttcatccccaggactgtgaagcctgctaacctctttgcagagctccatctccttgcattgtggggttccttctaactcttcagggacttctcaacctcccgtcacccttcctaaatgctggggtcctagagtccaccttgtgctccacgccctccccaggtgtcatctacatccctagctttgtgctgctcaccaccaaatcagtctggtgcttctgagatttgggcttcagacccaaacaactgctgtgtgctactgggcaactccccgaggtgtgccgaaagctccccaaacccagcctaccccaaacaaaactcattttccacccagactagtctctgcttccctgatccctttcctggaggctgtttccacttgccatcccatcatggaagccagaaaaccagtcttcttgacctctccccttccccactccatggagttagaggtcctgttgattttgccatgtaaacatttcggatttgcttacttcatccccactgccaccaacagtgcaggatggccctaagaggagaagtaatgtgctaccaagtggcccagccagagtgtgaaccaaacagtctggtaccaaaaccctattctggatcattcctcctttctgctccaccagcagtttggggcacaggcttgggaatccagacaggaaagctcctcccctctgaagcagtgggaccaaaaatgacagcatggttctagacagctctggaagtcaggcctgtgattgcctcattccctccaccttggcccccaaaatggccagtcctgaaggggtcacagttgatacttctctgagggggcatggggttggctgaggttatagcagccccacagggtggtaagctgggatgaagcaatcaactggaactcaacaagccttgagttctcaaagggggtgtgggaaggttcttatacatcttctatgaagggcagtttatcagtcactaaattacaaatacataaaccctttgtctcaccaaacctgctgggaatgaatcctacatatatatttatatgtgtgcaggctacatggttttcattatgctattgattttaaaagtaaaaatttggaaagaacctccatgtccaccatggggaactggctaagtcatttatggtggaatggtgatcataaaaattcattaaaaatgaagactctatatacagcttgaatattccttatcgaaatgcttgggaccagaagtgtttcagatctttgcatattttctgtttctcatttcagttcacattttctaagcatgatattcctactgatttccttgtagatattttgaaacagataagaaactcctccgtggaaattactgttaactagggaaaagacatgtttttttctgttcataaaagtaatgcgagttctttgtagcaaaacttggaaaatgcataaaagtaaaaaaaaaatgaaaacttgtgtaaaattcctcatactttagccatccatagatggtccttaccattaggattttactaattttccttgcagctttttcttaaaatatacacgtgtgtctacacatacatagtgtacactaaattttacatacacacagaggaatatatatgtgtatagttatcttgtgtttagaaatttggaatcccttctagttgtcttgtaacatgtgcttactctattttgaggattttctctatgaatttcatgtagctctttaaattaactttcaggaggattgtaacaatgtgctctccacccagtattttaccagccttgagttttctcaaagggggcattggaggggttcttatacatttacagtgggaatgtgaattgatacaacttctgtggagggcagtttatcagccactatctaaattacacatacataaaccctttgtctaagcaaacttgctgggaataaatcctacacatatatttgtatgtgtgcagactgtttgtacatggttttcattatgctattgattttaaaagtcagaatttggaaacaaccctccatgtccaccatggggaactggctaagtcatttatggtggaatggagatcatagccttaaaaatgaagactctttatatacaggttgagtatcccttatccaaaatgctcaggaccagaagtgtttcagatttcagatttttgaattagggatcctcaaactatactaatgtgagaaagagctctaagatagttaagtagataaaagcaaggtgtcaaactgtagagtatgtttccatttatgtaaagaagaaacaggctaggcaaggtgactcacgcctgtaatcccagcactttgggaggccgaggcgggtggatcacctgaggtccggagttcaagaccagcctgaccaacacggtgaaaccccatctctactaaaaatacaaaagctgggtgtggtggtgcacacttctaatcccagctactccgtaggctaaggcaggagaatcgcttgaacccaggaagtggaggttgcagtgagccaatattgtgccattgcactccagcttgggcaacaagagcgaaactccatctcaaaaataaataaataaataagaaacatttgtttatatgtacacacataatctctgaaagggtaaaagtggcatactggttggccagaagaattgggaggacagtgatgaggaataattttcactctttatcattttatatttttggaattttgaaacatgtaaaattattaccagttcaaaaaataaatttaaacaaaaatcttaactgtttcaaattaaagtaagtttgataatttctttcattgtttactgtctgcatcccccatacagtgttcacatgagcagagagtgtgtgtcttggtcatattcatacttgttctatatatactcgtgtgtgtgtgtgtgttcagttgacagaaacagttgagtgtaaaacagcttcaactcgatgataccaaagatacaagataaaggtccctggagggtggctgtagcgcacacatacatttccaagttactttgttaaatttcctgtatcaatgagccccaattatgagagccccctacatacaagttttagccaatagccaagtcccccatttccagtgttatcttcatgtcctccaaggtattcaagttgtttctgcaatgggtaactgggaagaaatcagcatccagtctgaaaagcagtctcccataggtcttttgtaaggagatccaacatggacatcttccagaatgcactgtacaacatggtagccactagtcatgtatagctatttagatgtaaatttttttaattaaaaaaatttttcatttatagcaacagggactcactgtgttgcccaggttggtctcgaattcctgggctttagtggttctcccactgtggcctcccaaagtgctgggattacaggcgtgagccaccatgcccggcccagagctgatagaatttttaaagtccccctgtgatgatctgactgtggtaggagtagggaggtgtaacccgagtcagtatgcacattgggagcctcctccactaggtcatacaggccttctgcgtgtagatggaattatcatgtcccacactgtaccccggcacctccctcgattaaggtgatttgcatcatgcagggcctgcctgttatcagagagtctcctggacatacagaaataggaatgtacagggactgcatacacctgttgctcaatttctagctaaatggctggaggtgggggataaagaaatggcattcatacggtgtaatactagccatgtttcagaaagttttcaaaaaatgtttagtggagaaatgtgcagggtcagtggaagaaaacctgtaaaattatattatgattgttttatactctatacggacaagcctaaattggagggcattttggaaaactcgcttggatacatgaaaactgccaagatcattataaagaaacaacaggatccattctagattgaaagcaacttgaaatgagacagtagagtgtaatgcgtgtttagtttgtgcttgaataaaagacgaaaactacgtaagacattgggacaactggagaaattagcatatgggctggggattgggtacaggcttcaatgtcgttacttgggtgagttgaagaatgtacgtgttcttaggggacatctgcttaaggatatacaaggttcaggggggaaaaatatctccaaacgatatacttttatatctatgtgtgtacatgtgtgcgcgtagagaaagaaaaaagtacatacgctgtatatttcaaagaacatataaaaccatggatgtcaatatacttcccttccggtgcgctgcctgcgcagaaccgagaggttctgacgatccgcagctcccacgctccccttccggccccgcagcgctgtgaactccatttcccagaaggccttgtatcccgtgcatggccgtttccaggcaggaaggcgaagggccttctgggaggtgaggtcctgggcggccgctggccaccaggcggaagtgcgtaccggaagtgccggcggcagtgtgtaagacgctcacgggcgcgcggactatcgggcggctaggctctctgaggaggctgccacagtggtgagtggtgtgtggaggagaggcgagggtgattgtgagggatggagaggcgcccgtggcctaagtgtgctgatggtgggagtgaatgagtggacgggtgggacctgtgaggggaacgcgaccccgggtcggcgcgggcagagaggcgcgcggtgcgtgagggcgcgacctgccatgtcctgccgggtgtcaccgcttatgcgcccgtgggaggggagcattctgtgttggaggcagaaggaatgagggtcgtgaccaactcattataccactggaggctctatgagcaaaccgcaaactgttctcatgaaagcaggatgttggtaaactgacaaactgcgtctgccgccagaaggaatgctgggggcagtcatgtcccaggtcccctgctccttgaggttatctacaggaacatctggaacctgctgaacaaagaaagcagtcatgtgggcctgtgttaaatcaaatagctgaccgtcagttaccctttcctccctattcagtctacctaacaaatatgaagggctgtaaaagctcagggccctgttccctagaatctaggagccccctgaccccttctttcaaacagatccttttgtctttgtcttcatttctgccttcgttctccttcgtttggtccagaagcaaccgtgacaagtggtgcccgaccagggacctgaacgaggaaggtctgccagagcagagaaagtgaaactgatcagacgaactacgaacccctggacgggagagtctgccggcggagaatataaggtcagttccctgagaaggtatcgggagcgggaggtttctgaatcagggtaacatggggcagaatctgtctgttgaggagcaacattatgtgcagctgcttaaagttttacttaaacaatctggtgctcgggttagttctcaaacattaagcttctgcaggaggttattacacataacccatggtttctgcagacaggtactcttgctgtggaaaattgagactgagtaggagaaagattgaaacgagctcatcagaaagttcttaaagtggatccttctattttctctgcttggggtttggtctgtactgtcctcctgccattgtcctcttcttattctgccagacagcaggtgctatgttctgaatctcaaaaattgaaagaatcttttgtctcaccagcagcgcccattgaaaatgataaacaggagagggaggatgagaactggcctgtactgtcccctccagtagcagaaatagagaccccagtacaaaaaattctacatgctgtggccatagctggcgagccactaggaccttgcacttttcctattaccttaaggcctgatccaaataatccacagcagtttattcatgaacacactccagtaaaatttaaattattgaaagaattaaaagctagtgtggttaataatggaatacagagcccatttactttaggattgttagaatctgtattcagcactatgcgcctcccacccttggatataaagcatttagcttgcacttgtttctctgctagtgcatatttgacatggaatttaaattggcaagaaatgtgtgcagaccaggctagacagaatctcaccgctggacatgggaacattacagaggaaatgctattgggtagtgactcttattcagatctggtgcaacaattgacacttccagatgctgcttaccatcagtgcgcctggccgctaagcgtgcctgggccaccattcctgagaaaggggtctcaataaaatcttttccgcatatcatgcaaaaatcacaggagccctttgcacaatttattgcacagttacaacagtcagtgaggcatcagattcctcatactgctcctgcgaaaatgcttactttgaccctagcttttgaaaatgcaaatgcagattgtaaatgtgcattagcacccgtgagatgtacaaacagcttgggaaattttctcaaagcctgtcaggatgtgggaactgaactccatcgttcaactgtgttagctcaagtaatagctaatttagtagtgaacaaatctgaaaagggccaagggttgagccctaaagtgggaaaatgttataattgtggaaaaattggacatttcaaaaaagaataccatcagacctctgggcagaagggatcttacaatgcaataccgcccccccctccccgccccgctccccccaacacacacacacagaaaaaaaaacaccaggactttgccctcgccgtaataaaggaaatcattgggctaatcagtgttgctcaaaatttcatcagaatggcaccccgctctcaggaaatgagaatggggcctgggcccctcaaacaatgagggcattccccatccaggccacaaccctgctacaggggtgggttcctggaggaacattgactccctctcctctggaacaccggggagtgcaggattagatcgctcagtcagagaatgggtcacgttagttggaggagacaaacccaccagaattcccacaggcatttgggaacctttgccaacaggatatacaggattaattttaggccaaagccatctgaacttacagggcattactgtgatccctggattgttgactctgattatgaaggagaaattcaagtaattgtaatgtcacaagatctttgggtttttaaacctgggaaatatattgctcagctattgcttattattattctctgcaaattacacccttcttcacgaaaggagaaaagaggaaatcaagaatttgggagtacaactacacaggaaatttacctatcccaacccatagcttctaattgacccacctgtgcagtgcaaattaaaggaaagaagtgttgtgggtgtatggacacaggagcagatgtttcagtaatatccaaaaacaattggcccctgctactaacctctgcatccttagtgggagtaggaacagctcaaagtgtttaacagagtgctgaaattttactttgtgtcagtccagatggacagccatgtacttttcaaccttatgttgcaaatatacgtgttaatctctggggctgagatttacttacagcatgggatgtgagacttacaaatgaaaaggttgataatccaggatttaaaatattgaaggaaatgggatatcagagtgggaaaggcttgggaaagttcctacagggaaaccccggtccggtatcggtaactgggcaaacagataggaaagggctaggtcatcaggatttctgataggggtcattgatacttcttctccacccactgccttgctgctagagtggctgactgataaacctgtgtgggtggatcaatggcccctatcacaggagaaaactgactcaactccatcagctggtaagaaagcaattggatgcaggacatataaaagtatcagttagtgcttggaattcaccagtatttgtgacccccaaaacgtcaggaaaatggcaactgctgcataatttgagagctgttaatgcacaaattaaaccagtgggtgcattacagcaaggtctgccatccccggcaaccattccaagagattagcctcttgtagtaatagatcttaaagactgttttttcactataccattacacaagaaggacaagcctcaattcgccttctctgtgccttctattaatcagagagagcctgtctcttgtgatcaatgaaaagttttattaccccaggcatgctcaacagtcctacgttatgtcagcattttgtaggaaaagcattgaaggagcctcggaatatgttttccaccacctacatcattcattatatggataatattgttttggccactcctacagatcaagtattataccagttattcagagaaataaaatgggctttaactaaatggaatctcaaaatagctcctgaaaaggtacaaacaacctcctcataccaatacttagatactactgttactgaaaaaagtattcagcctcagaaagtagctcttcgtaagaacaaattacaaactctgaataacttaggggatattaattggctgcgcccaatgctaggtattgcttcttatcaactcactcatgtttatcaaaccctccaaggagattcttcattagattcccctcggcaacttactaaggaggcagaagctgaattacagcttgtagaaagatgcttcagcaacgacatgcctcctggctacaaccacaaaagtctttggttttgtttattcttcctaccccccattctccatcaggacttttagctcaattcatagacaaaactataatggtaatagaatggctttttttatccagtcaaacagtaaaatctttgcaagtttatcttgctttagtcacacaacttataacaataggcaggcatagatcaaaaatgcttacaggatatgatcctgataaaattattgttaccttggattcccaacaacaggctgcggcctgggagatgtccactgcatggcaaatcactttcgcagattttgtagaaataatagataaccattatccatcagacaaaattttgcagttttataaaattcacccttttattccccctgtgattgctcatcacaaacccatttcaggtggacagacctattttaccgatggctcttccaaaagccacacagccatttatggacctaaatatacttaaataataaagacccctagagtttcagctcaacactctgaattaatggcagttattcaagttttaaagctcacagctttatttcctattaatattgtctgtaattcagcctatgtcgtaaatgtagctagttgcattaaaactgccactatcaagagtgtacggaccagccccacagggtcggtgggtctctccctgtgtgcggcgacgagagagtgtagaaataaagacacaagacaaagagataaaaggcagctgggcctgggggaccactaccaccaatgcgcggagaccggtagtggccccgaatgtctggctgcgctcttatttattggatacaaagcaaaaggggcagggtaaagagtgtgagtcatctccaatgataggtaaggtcacgtgggtcatgtgtccactggtcagggggcccttccctgcctggcagccgaggcagagagggagaggagacagagagaaagacagcttacgccattatttctgcatatcagggactattagtactttcactaatttactactgctatctagaaggcagagccaggtgtacaggatggaacatgaaggcggactaggagcgtgaccactgaagcacagaatcacagggagacggttaggcctccggataactgtgggcgagcctgactaatgtcaggccctccacaagaggtggaggagcagagtcttctctaacctcccccagggaaagggagaccgccccccaccctttcccggtctgctaagtagcgggtgttgttccttgacacttttcgctaccgctagaccacggtcttcccaaacgctggcgtcaccactagaccaaggagccctctggtggccctgtctgggcataacagaaggctcgcactcttgtcttctggtcacacctcactatgtcccctcagctcctatctctgtatggcctggtttttcctaggctatgattatagagcaaggattattgtaatattggaataaaaagtaattgctacaaactaatgattaatgatattcatatataatcatatctaagatctatatctggtataactattcttgttttatattttattatactggaacagcccgtgtcctctgtctcttgcttcggcgcctggatggcttgccgcccacacaagagcaccttaaaaccagaactgcttaacctatttctgagactccaaaaagctgttcgctctcatgctgccccttttcatatttctcatatccgatctcacacacaacttcctggggccactatctctaggtaatgatagagcagataaattcatcagttctatatttcaacaagcccaagcttcccatgctttactgcatcagaacaacttgcccttactcgtatgtttcatctgcctcgcagccaggcttgagttattgtgcaagcctgccccacttgccagcatgtccctggtgttgcacctgtggaaggatgcaacccacgaggcttggctccaaatgaaatctggcagatggatgttacatatatatagcagcctttggctaactccgctatgttcatgtaatatagacacttactcccatatgttacatgccacatgccaaactggggaaacagctggtcatgtctgacgatactgtctgtcgtcatttgcccatatgggggtccctaaacaatttaaaactgacagtggactcgcttatgttagtcatgctttcccaattttttacaattgtgggcaatcaatcataaaacaggaattccatacaatccctgagggccaggcattattgagcgggtacatcaaacactacaacgcatgctgaaaaaacaaaaagggagaataggggaccaattaccacttcaaacaaaattacatttagccttgtttactttaaattgtttgactcctggtacggatggcaagaccccagcagaacgacactggcaactgctagaggaaaagaggcaagtttatccaaaagtgttatggaaatccccagaagaaggacaatggaaaggtccggtggatttgctgacgtggggacgagggtatgcttgtgtttttacaggagatggacaaaccgtgtgggtgccctccaggtgtgtgtgaccatggaacgggagaccggagggatccatggtattcaaccgtgggcctgttacctccagtacgagccatgagccagcggaatctgaatgcaaagacagaacaagggccgaccggagtcacaatgacatccaaccccataacatggggacagatcaagaaaacgacacaagaagctgagaaactactggagcgccagggtcaggcaaaaacccctgactccatgttcttggccatgctagctgtagtgtcctgtgcggtatgtttcccctgtgtagaggcaaaaacatattgggcatatgttcctaacccactggtagtacgactggtactctggagcgacactcctcctgagatatattatgatcagggagcgtgggcaccaggacccctaactccgtctgacacagagcaatagcatcaattacaccggcccattggaaggactccctttatgtatcaccatggatacgtcactcaactgcagctgtcttgcagtccaatctcaggcatggttaagtcaccatggaaaaattatgtatttattaggcctcagctttattaatgttactggcgtgttcaccaatcactcctagccccatcactcaaattgtatggattatatggaatgggctccctttgatatttctcacccccctccttggacccagtgtcttggccccttggccagacaacagtctatgttaatgggaaacattgactggggtccccgtggccatttagaggggagagatgaaaatcagacctcttggcacaaacttcactggcactggtggtggaccttcaacacctcttcatcacatcacactgggattcagtcccccagttggctgcacaacttgcttggtataggacaggctttaacccgcccttacctcagtgacgtcatctaggaaacagaggcccaattcaggaatcgatatggaaggcaacactcccatttatgaataacagcatctgggtcagaacattatccaacaatagtaatattactcaacacagttttaatatcacctttgtaaaaaatattaccactcaatttacggtttgtgggttttttgttgttgttgttaactgtttgagatggagtctcactctgtcgcccaggctggagtgcagtggcgcaatctcgggtcactgcaacctttgcctcccgggttcaagcaattgtctgcctcagcctcccgagtagctgggattacaggcacccgccaccgtgccaggctattttttgttttttgtatttttaatagaaacgggatttcaccttcttggccaggctgctcttgaattcctgacctcgtgatccacccgccttggcttcccaaagtgctgggattacaggcgtgagccaccatgcccggccagtttgtgtttttaatccctatgtttttctagcatctaagaaggaccaactccacgtaaacatcacccagttgacttgtgactcttgtcaactgtatcactgcctcaatcatagcacaatacaaacacacaacatatccactctaataattctgggtcgtatccctggattatggatccctgtcaatttgtgcaaaccttgggctgccacccctgctttacattttgtaaaactccttcttacccagctcactcatcgtgcacgtaaagccttaaacatagtaatttttactgtaatctccttagtcacactaataacctcggttgtagtgtcctcagtagcactacatagttctattcaaacagcccaatatgtagaaaattggacatgtacagccaaccaggcatggatgcttcaaaataaaattaataccgaattacaaacaaaggtagcaatgttaaaggctactgttctgtggctgggaaagcaggtacaaagtttgcaattgtagcagcaattgcactgtcatttcaatcatattcatatttgtgtgaccaatttggaatagaaccaaagtgaatatccatggaaccttgtaaaagctcatttgcagggagcttttacatccaatattacttttgatatcagtaacttacagagtaaaattcttaacttgaataagcaaactcaaaaataacagccctttttagaagcttaaacagaattccagcagggcttagaaagcctcaaccctggccgggtgcggtggctcacgcctataatcccagcactttgggaggccgaggcaggcagatcacgaggtcagaagatcgagaccatcctggctaaaacagtgaaaccccatctctactaaaaatacaaaaaaattagctgggtgtggtggcgggcacctgtagtcccagctaatcaggaggctgaggtgggagaatgacgtgaacccgggaggcagagcttgcagtgagccaagatggcgccactgcactccagcctgggtgacagagcgagactccatctcaaaaaaaaaaaaaaaaaaaaaaaagcctcaacccttggacctaccttaaacataacttcaatgtctcttttataataattacaagaataatgttgttatgtctctgtttttttgctcatagtctataggatcgggtgaaccaccaaccggcaattgaaagctgcacagcctgaaattacctttattcaattaatgcaaaaacaaaaggggagatgttggaggccgaaggaatgagggtcgtgaccaactcagtataccactggaggctctgtgagcaaacagcaaactgttctcatgaaagcaggatgttggcgaactgacaaactctgtctgccgccagaaggaatgctgggggcagtcatgtcccaggtcccgtgctccttgaggttatccacaggaacatccagaacctgttgaacaaagaaaggaatcatgtgggcctgtgttaaatcaaatagctgaccgacagttatcccttcctccctattcactctacctaataaatatgaagggctgtaaaagctcaggtccctgttccctaatatcaaggagccccctgaccccttctttcaaacagatccttttgtctgtctcatttctgcattcgtcgtccttcgttcggtccagaagcaaccgcgacagtcctgcatgtgttgatgccacctgtatgtgcaggtgtgacctcaggtgtgtgagtatccctcataccccttatcatcactgcctattcgctcttcctccagcctctggcaaccactaatccacgttatatgtctagatttgcctcttctggacacttcatataaatggagtcatacaatatgtggtttcttgtgtctggctttttaccactgaacgttttcagagttcatccatgttgtagcatgtatcagtttttcattcctctttatggctgaataatactgcattgtatggatataccacagtttgtttactcattagttcatagacattggggttgtttccaactctctgatattataaatgctactgctgtgaaaattcatgtacaggtgtttgtgtggatgtatatttttaatttgggaaggggaggccatgggtgggacctaggcttgtgaagagcctggcctgggtgtatctgtttgtccgaggagtgcctgtatgcatggccatgaccacacccactccttgctgcctgtgctcattagccatacttcattttccagaatcccaggcctgggcccctgaagtcaaagccaggagcctagagccacactgatgtgtaggatcaaagagaaggcggcagtggccctggaaacaaacctgtctctgcaagagtcactagcaacctgggacctctgcccaggactgagacctcgggtgccccctaccctgtagctgctgaggccaagcaatgtggagacagagagagggtgaggtgatggagcctgaggtgccgagtgaggtagatggtggggtggcagtcacagtggcacaggaggcaggtacagggctagatgttttcagaaaccagatatccctctaaaacacaccctgcttctgctgccttcattccactgccctgccttcctcagcctgctctacaccactacctcctcatggttctcctgcctcccgttgcccccttcatcactctccactcagcattgggtagagagggtcttttacccctgactgatgaggccacccctctctttaaaccctccatcactgcccaggccatcagagtatggttggcaaactcttctgtaaaacacaagcagcaggctgggcgcagtggctcatgcctgtaatcccagcattttgggaggctgaggcaggcctgaggttgggcctatgagaccagcctggccaacatggtgaaaccctgtctctactaaaaatacaaaaaattagctgggcgtggtgatgcatgcctgtaatcccagctactcgggaggctgaggcaggtgaatcgcttgttcccaggacatagagattgtggtgagccaagatcgtgcctttgcactccagcctgggcaacgagcgaaactctgtctcaaaaaccaaacaaaaaacacacaagcagcaaatgtcagctttgtaggctcagagagaaaaccaagaatgttacaaaggtacctatctaacaagagaaaaacatgtccatacattttattaataaaatccaaaactttgttaaatgtaattcattccttaatgagcaaaaagcttttcacaggaggttccattttatagataggaaacagaccccaagggaggtgagcagcccagaattacagcagagagtggtgaagatttgatcctagatctgacagcctctaccatcatacttgccattctcagcttaggaataagatggggaggaaggtgtgggtaatgggcaaatcagggcccaaatagtctgttcagtactcttgtctcgtgggaaggaacaaaaggccccacatctgcccttcctcctgggagtctctgttaggacctgaattcagtacagcaggaatgatcaatttttctctttagagcactcacccacttgacatctcactttgttctcacatagtcctcatagaggtatcctgtggctgctgtccttgaagcctgatagcatggagctgaggcctcagactataacagggcacataattttcatgaagttcaagaagaggctgggctgggcgcggtggctcatgcctgtagtcctagcactttgggaggccaaggagggtagatcacctgaggtcaggaattcgagaccagcctggctgacgtggcaaaaccctgtctctactaaaaatacaaaaattatcctggcatggtggcaggtgcctataatcccagctactcgggaggctgaggcaggagaagcgcttgaatccggggggcagagcttccaatgagccaagattgcactatttcaccccagcctggacaaaagaggaaaactacgtcttaaaaaaaaaaaaaaaaaattaggctgggacacctttcctggaagggctacttactacaggggagctgtctaaggtgctgaaatgtcctagccctgcgctgtccaatatggtagttatgattaaattcaaataaaattacaagttccatgtcccagtcacaccagctatgtttccagtactcaggagctacctgacactgatggtgccatattggacagcacaactccagaacttttccatcctcacagaacattctagaatttaatttgaatgctagttacacagggctgtgcatttaccaaattcactaagctgagcacttgtaattctgtaaaacatgtatatgtatttttgaaagcacaaagtttcacgtccccgcctgccagtcactttaccaaacaacctttggtttaacttctctgtgccccagtttcccaacctgtaaaagagagtaatgatacctcccctttgattggttgagagtaccaccaaaggtgtttgctgggtggcctgacctgcaggaggtgctcaggaaaggggagctgctgctgtcatttggtggaagtgggtccccttatctggctagcagatgccttgagttatggtgagtatgatggggacagactcccaggaggatggaatggcatcactctgtggaaagactgtgaaacagaacacgaacacctcatggcatctttgctgcctagagccatgccacttgcacaccctccttctgctcctgactcccaggaaggcaagggggtcactgggcttggggctccacagaaagaggcttcctgatttgatgcttaagagctgtgcctcagacgcctgcctctaaaacagaaagccgtccacacagacaccccacctcatctgggtacctcctctggacctaggctgggtccccacaggcagccacagccatctatgctgctgcccccacactgcctctggctgtgggcttctcgagggcttgctgtgtgatgctgagttccttaacgtggagacaatgtgttggagtgtggcagtgttcaggccctgctagccaaataaggggacccacttccaccaaatgacagcagcagctcccctttcctgagcacctcctgcaggtcaggctgctcagcaaacacctttgatggtactctcaaccaatcaaaggggagctatcatcattaccctcttttacaggttgggaaactggggcacagaaaagttaaaccaaaggttgtttggtaagtgactggcaggcagagatgtgaaactttgtgctttcaaaaatacatgtatattttttacagacgtacatgtgctcagcttagtgaggaaactaggaaacaggcccagagctgggatatggtcagtcagtggcatgaagagccgagagtggagcctggcaggaatttccagctggcatccatttgttactgaatatcagggcactcccccagagacacaagccacccctaaccacattctggaaaacgatctcacgtgtgtttccgtcctagatcaggggtgctcctgccaaggagagggtgtatgtggggaggcctgcagctgtttcccagaccttaatcagccacaaggagtccacgctggggagggtgtactgccatgtagtgggtgggaagatacctttggcaagaacacgtgccttgtgagctatcagcagattcccaacaaaaggagaccctgtacgtgcgaagagtgtggcaaggcctttggacagagaagtcaccttgttcagcacaccagtgagaagctgtatgcatgccaggaatgtgggtgtaccttcagcaacaattcatctctagtcaagcactggcacgtccacacaggcgagaagccctacatgtgtggccactgtggcaagtgcttccgagagagctcatcccttgccaagcaccagcgtgtgcacacaggtgagaagccatacgtgtgtggtgagtgtggacgcaccttcagcgagagcacacaccttgtacagcactggtgattccacaccggggaaaagccatttgcctgccaagagcagcaaagcctttgctgacttctcggccctccttgcatgccacggaacctacacgggtgagaggccctacgagtgccgggtatgctgcaaggcattcagccccagcttgtccctggctgagcacatacgctgccacacgggagagaagctgtatgcgtgtcaggaatgtgggaaagctttcagccacagctcatccctcagcaagcaccagcaggtacacacaggtgagtggccctatgtgtgtgcagaatgtggaaaggccttcagccaggggtcctacctgacccagcacctcaagatccacagcggtgagaagccgtacatacgtggtgagtaaaggaagccattcggtgactcctcagccctggtcctacaccagcgggtgcacacaggcgagcatccttatgcatgtggaaaatgtgggaagactttcagccacagcaagtttctcacccagcatgagcaagtccgcatgggagagaagcccttcatgtgtggtgactgtggaagagccttcatgcaaacctcatccctcgccctccatcagaggactcacaatggggagaagccctacaagtggaatgagtgtggcaagtcctgcatccagatgtcacacctcaccgagtattaccaggtacacgctggggaacgaccctttcagccgtggcacacacctcacgcagcaccagcatgtgcatgcatgtaccaagccattcatatgccatatatgtcagaaaaccttccaggaggccacaactcttgtactacatgagaggattccctggagagaagcccttttgagtgttgtgagtgtggcaaagccttccgccaaagcagattcctggcccagcaccagagaattcattcccagggaaaaccatgtgaatacatggatatcagaaagccctcagtgacgctttggttcttgtatgtcagtgaactgggcatgtgccaaatatggcagagatcttcccatctatccttggtgtgttgtcctttgcaccggggtggcaggtgaagagggactgtgagtgtgaggaaatcagggtcagtgtgagaagcccctattatacatttctcccttcagggtcaccggggcgggtgaggaagctgggagtgggcctaggatatgtctttcagatgtcacatggagatacttctccataattatcaaggggcacaatggccacttccactttaattagattcccatggatgctaaccaagtggtaggaggtacacaggtatgaacaggtttcctctcagcagtcctagaagactttatttcagtttttgccaagacaaaaatgaaatttaaaaaatgtgggtttttttgttttttgtttttttgtttttttgagacggagtcttgctttgtcgcccaggctagagtgcagtggcgcaatctcggctcactgccaacctccgcctcctgggttcaagtgattctcctgcctcatcctcccgagtagctgggattacaggcccccgccaccaaacccagctttttgtatttttagtagagatggggtttcaccatcttggccaggctgatcttgaactcctgacctcgtgatccacccacctcggcctcccaaagtgttgggattacaggcatgagccactgcgcccgcccaaaaaaatacatatttttaaaagatgcttttgcagttgtttgtgccttgtattaaggtagaccatatagtttggggttttattgcccagaaccaaaaaggtaaaatttatatgctgaagtgtgtgtcacagagtctagctctttaagaagaaaattttgtgtgttcctcagcttcagcatgaggacgtcactaaaactagttgagacagtgatgatgttcgttaagattttactgagcactttagaagcactttaagtagattgtcccattccatcctcttagccggcctgggatgtatttttattcccacttcatacatcagggagctgagactttgagaggttaaatcacttgcccagtgcccctagctaaaaggcactcacttttcaggacgaaaatacttgagttaatggataaggccaaggtggcagaagtatttccttcccttttaccaatgcccagaggtatttactggaattctagaactgaggaggcagttctagaatataaagtcctattgagcatgggagacaatggaatgattgggttccacctgaagaagcaagttgacccatttagctgacttgaggcaaacgcaaagtagtaactgggagccactgctcaatccagatgttgattaaatgcttcctgggagccctgcatgtgttcccactctcccctgtaacattgctcaggggttctctggctgtcaggctgagatctagcctctagctggcctctatgcgggggtccccaagatcctcaggtgtgaagattcactagaggaacatagaaaactgatatacttaacatttacggtttatagtcaaaggatacagattaaaatcacaaagataaaagatgcgtagggcagcaaccagaagagaggaggtacagctgttgtagagactgctgaattctcccagcgctgagtgacaatatagagtagcatcaaccaaggaagctcacccaagccttggtgttcaggacatttactaggtgatgatctagtgggcatggagtgcccacctgactgactttagtcacttagtctcccacccctctagtggtcagactgttacagtgtggcctaagatcctcaccataaatcacattgttgacaaatacttggcatggcccaaggtcctcaggtaaacaaagatactcttaggcagcatgatcaccacatgccttgaactgaaagaaaccagggtcacaaatgattttgttggctttctacatggaaggaaaagaaaccaaaagtattattgtagtggattgaattactagctcaattcttcactgctccttgcatatatacacccacggccatatttatggttcttcccagtaaaggcaaatttgatgtccccacccattccttgagtttgggtgtggccatgtgacttgatttggccaacagaatctaagtggaagtgatagcatgctagtcctgagtccaggcctaaagcccattgtgtctctgccatcaggatgagaagaatttttcctgtgagccttgcaagacaaatacagcagacctggacccaaactgcagcctagagccaagcccagctgagcccagcccagatcagccaaccctcagacacatgacaaaaataagcactttttttgctgtgggccacagaggtgtcgtagctgtttgttacagagcaatagctgatacaattgccaaattaaagtgaatactccctgaaaaagataaggtttgaaatctggggagaggataagaaagagacaaagggagagaggaaaggaggagcatccactcaggagagtccagaggccagaatgctgattgaacagagcacaagcacaaaaggggtggccaagggaaagggccttccaaggtctgcagtattgactacaggtgccatggtgggtgcaggagatgaatgaggagaatccagctatgcagctccaggcaagggaacattgttggtctgccagtcattcagtcattcctcagccaactcttagtacctagccctgtacaaggcatcaaggataccctggcctcggctatgtaaagggcaggacccctctcaggcctaacagcacagactcacaatctaggcagaaaaggagccaatgaggagagattccattggctttccaagtcaccctatacccattaaatgtcaaccagggctcttcttcctctccctgacaccagagtcccctccagctgctgccctatctcgctcgtttcctccttagaatctccctgaaaaggggtctaaggatccccacactgatgccactgtccattcacccgttatggactgaattgtgtccccccaaaattcatatattgaagtcctaacccccagtatacctcagaatatgactgtatttgaagataagacctttaaataagtaattaaggttaaagaagatatggatgggtcctaatccaacatgactggtgtccttataaggagagagagacagtaggggcatgtgcaaacagaggaaatgccatgtgaggacacagtgagaaggcagccatctacaagccaaggagagaggcctcaagagaaaccaaacctgttgacaccttgatctggggacttccagcctccagatctgtcagaaaataaaaaaaatttttttttttttgagatggaatctcgctctgtcgcccaggctggagtgcagtggcgtgatctcggatctctgcaaactccacctcccgggttcacgccattctcctgcctcagcctccctagtagctgggattacaggcacctgccaccacgcccggctgattttattttatttatttattatttattttgtatttttagtagagacggggtttcaccttgttagccaggatggtctcgatctcctgacctcatgatccgcccacctcagcctcccaaagtgctgggattacaggcatgaaccaccgtgcctggcccagaaaataaactttaaactatcgtttaagccaccaaatctgtggtattttgttatggcagtcctagcaaactaatacaccctcctcccacccataatcagagggcactatcaggcacctgggtcagccttgctcaccccttggacactgtagttcaacccatcaaccctatcatctataccaaacttgtccaacccacagcccacgggctgtatgtggcccaggacagctttgaatgcagcccaacacaaattcataaactttcttaaaacattatgagattttttttgcgatttttaataaactcatccgccatcattagtatattttatgtgtggcccaagacaattcttctaatgtggcccagggaagccaaaagagtggacacccctgatacaccttcaaaacagatccagatctgaccacctgttagcatctctaccacaccaccgtttgaccaccctgatctgagctacctgcctcaggtgccagtactctcaaagcaattgcatctttggtctccctgactccactctcatcttgacagtcttctcctgcagcggccagagaattcctatgaagagctaagtcacagcacagccctcctctgctcaaaggcctcccatagctcccacttctctcaaggtggaaatcaaagtctgtatgtgagccaagtgtggtggctcacgcctgtaatcccagcactttgacaggctgaggcaggaggattgcttgaggccaggagttcaaaagcagcctaggcaacacagtgagacattgtctctacaaaaaataaataaacaaagtcgtatgtggctcacaagcccttcaagatctgcccccacaggcctcccttttctgtccttgtcccctcccatctccttcccttaatccaccccagccagtcttcctcatccatgcctcctcctgacgtgggcatttgtgttccatctaccttgaacttactctccctgagttcttcgctctattcaggcctcagcttaaataccaacttctcagaaaaatgacttctttgtttaccatctgcctccccacacaataacatcacctccataaaggcaggccatgcttatcatcattgcagtatccaatctgcagtggtgctggctgcctgttgtgggtgctcagtatttatctgtggaaggaaaagaatatatgctcattccagctgctagcagtctgcagggcaaagtctgagaataataggggatgtgagcacaggctggggccaagaaacaccaccagcaccaccaagcaatcatacacaccctgcctcaaaaaggcctcacctgaacataggctgggccaccaacctctatgtatcgggccccaagccagagtctcctgctcaatgtctcttacacatacacacacacacagagaagatacattctcacacacagtccaggcatcgactgaatcacacaatcacactaccattcacagtcaccgtaacaacatcacacacagtctagggcctttatactgtgtcaggtccaccccattacctctaagtatctgtctcagacacaattacacctggtgcaggcaaacacagctgcatgattatcacatatgatgattaaatcacaggtcacacacacgcagagtaagcacacagaacaacccacaaacctggtcacagagtgactcatgcagacagacgcccagctcaaattcagtaaaaaatgatacacatttataaaaatgattacatgtgttcacagagagccacacatagctacactcaatacacaccctgacataggcaaccacaccgctcacctctcacaaaggcaccttcagtacttacacagacactcacacccacaagccctcagacaggcaccctctcccctcactcctaacatgggcaccctcacctctcacccaggtacccttgttactggtggagggtgtccaggttcttggcatcttgaacaaataattggacaaaatgcacaaagaaaagaatgaagcaacaaaagcagagatgtattgaaaatgaaagtacactccactgtatgggagcaggccggagcataggggctcaagagcccggttacagaattttctggggtttaaataccctctagaggtttccattggttacttggtatatgccctatgtaaatgaagaggacgaagtaaagttacaaagtgatttactccatgtacgccctgcataaatggagaggatatttcctaccatagctgcagtttccatttgatttacttctaggaagtccttaggttccctgcctccagacccgattttcttgcctcacccttacccctcacccctcacacaaacaccctcagccctcccaaagccaccctcagcctcacacagccgccctcaccctcagcctcacacaggcaccctcagctctcacacaggcaccctcagccctcacacagccgccctcaccctcagcctcacacaggcaccctcagcctcacacaggcaccctcagctctcacacaggcaccctcagccctcagccctcacacagccgccctcaccctcaccctcacacaggcaccctcagcctcacacaggcactctcaccctcagccttcacatttccctcacctccaagtcccgcctttcgcgcatcgcctgctgctctcccactcagcgccacctcagtcccacaaaggccgggctgggatcctgtggcctccgtgctgaccaacgtcaactacaattcccagcaggcaccgcgcctgggtacacttgagcttccggaggacgccgggaattgtagtcctggcgggcgtgggcccttgaggtgtgctgggagctgtggtccgggtcggcgggcgcgcaagttggctagtctctgcggccacctccggaagggtccgccggctgtgctggtgaggtgggtttcgggggtgttctccgtcctgatccaggctggagaggggcacagcaggtccagaagccgcgaacctctggggcggccagagcgagatgcggggtaccgcccagcgggtagagagtgagaggctgactaggggacgtgagtagacggactgcgagtgccggacacacgcgcagaggatgtgacggactgacggaccaggcgtggacggaccgtgtgtgcacggactgacggacccggtgtggacagactcacggaccgaatgtggtgcggaatgacacactgagtgccggacggaccgacggagaatgtgtcggactgacggagtgtgtgtcggatggactgattgaccgggtgtggggcggacgaagtgtggagcgggcggacagataacagataaaatgtaggaccagtggcctgggagggtgtggggcggacccgtttatgtgtctgataggcggttctgtgtctgacacctcttgggtgtgtgtatctgacgggttggagtgtgtgattctgataggttgagtgtaacactaaccatggagtgtgtgactgacagagatggttgccgtttgagacttcctacgtgggttgtgagatactgtgagagggtgagcgtgtgacggtgggatttcaagtgtgactgattttctttgtgtgtccttgagatggtgactaagattatgaatgactgtgatcagaataatactgtgtgatggaaatgctgcgagggcctgtgtttatttttgagacggagtcttgctctgttgcccaggctggagtgcagtggcgcaatctcggctcactgcaacctccatctcccgggttcaagcgattatcctgcgtcagcctcccgagtagctgggattacaggcaccggccaccacacttggctaatttttgtatttttggtagagacgggctttcaccatgttggttaggctggcccggaactcctgacctcaggtgatccacctgcctaggcctcccaaagtgctgggattataggcatgagccaccatgcctggccaggcctgtgtttatttgactgattataggtgacattgagatatttcctgtgtctgggtattttgaaggctgtggctgacagactgtacctgagataatatgtgttaatatctgattgactgagatttttatcagggagactaaaacttgggtgatccacaaacagtttaccaagcatatgagagaggatttgtgctttgccatgtctgcagctgaaactgagtgactagtggtcattcagctgggcttatggatatgtcccccagtgtttgcttacgtgtagcagggggctatggtatccatacatctactgcatgtttactgtgcaccaggcctgtgctggacacttataataaatcacctcacataatctcatagcaaccctctgaggtaggtaccattatcaggcttggtataatccatgtgtgagaaatgaaaagaaccaccctccttggttggtaaagcagctgtggatggggaacctcaacctgataggagttgaggttggctgaggaggctgaggaagtttcacatacatgtatttcagagaccgtcatgagggatttctccagaacaggtgttccaggggtgcaaaagagaacttggaagctgttgcagcatctattgtcatccctgccacccttgctcctccttcccctcatgattccctacattcttgggtaaccatgctcagcctttactggtcattccatttgcttaatgcctgcttattgtgaacctgctatagggcaagtcctgtgtgctgtggctccaggacagcccagcctctctgaggaaacagtacagaactagcaaagagttacccagggcactctgggaagaggacttagactagtaccaggtatctgggatgacacctgaggaaagtggcagctaagatgaggcctagagagcccagaggaatccgtcagagacggatttcagaactcgagagcagcaggggcgacaaggggcttagaaaggccacaagagacccaggagaactttacagtgcggcgaaggggcttaaacgcagcttggccagaggccaccagaggtcaccagcggtcaccaaaaggtttcaggattggggtcttgttttagagtaacgttctcttcttcctgtgcccaaggccattgctctttctcaggcctcctgcatctctgtccagggtgacttccttgagcagagactccaggcacactgagcgtcctggctgacattgaaggaaaggaaaaagaactccaaatacttaaaactgtgggagtcgtggatgggagagggagaggctaagtctttgagtaaggagtagtatgtggccaaagcaaagtgtcgaggtctcctaggagaggttacacttaatttagggtattcttcctgactataagagaaaacaaattcactgtgggaagtagagaatgtcaagaaaagtaatacagtagtcacccctcatcttcagttttggtgaatatagtacaataaaatattttgagagagagagaaagaccacattaatatagcttttattacagtgtattgttataattgttctattttattagtcattgttgttaatttcttactatgcctaacttatgaactttatcaagggtatataataagaaaaaaatatagaatatataaggttcagtaatatccatggtttcaggcatccactggagggtcttggaacacatcccctgcagataagggggaactaccatagtataaaataccttggtaaggatgtagagaaattggaaccctcatccacaactggtgggaatgcaaaatggtatagccaatttgcaaaacagcctggcagtttcttaaaaagttaagcattgcctacatgcggccaggcgcagtggctcatgcctgtaatcccagcaatttgggaggctgaggtgggcggaacatgaggtcaggagatcgagaccatcgtggctaatacggtgaaaccccgtctctactaaaagtacaaaaaaaaatagctgggtgtggtggtgggtgcctgtagtcccagctactcgggaggctgaggcaggagaatggcgtgaacccaggaggcagagcttgcagtgagccaagattgcgccactgcactccagcctgggcgacaaagcaagactccgtctggagaaaaaaagaattttttcaaaaagaaagtattatctccctctgaatgtcggtagcacccccatctagaaatggggctagattctgagaagtagaattaatattgaggcagagagcacagtcattttaaagctcttacaacatactgccaaattgtttgccaaagatattctaattgattgccctcaccaatagtacatgaaagtagttttttgctgtccctgaccagcattcagtgctcacagttctagaatttggaaaggctttgagtgtggaggaaagatcgcagatagcctgagctcaaacactagctttgttcctactgaccagatgactctagcagctgactttccccaacttggaaaatgggagtggtaatactgactcacagggtggagctaaggcttgaatgggataacagatgccaaaggctagtgtggcctggtagccggtaggttcccactgactgtctgttcccattttcttttattcctgttgcacactatacccatatccatcatcataattatcttatcatgtgttggtcgctgtccttccgttgaggccattgagcccagcacccatgccttccccgtatttgcattcctagtacagtgctgggcacagagtaggcacctaatggggctgtgctgaacaaaagtattattattgatgtatgtgcccagcaatgctgtagacactggggataaagcaaagacctaaacaaaaacccctgcccttaatgtgctgatactccaacagggacaagtaaataataaacaagtaaccacatacgtgtatcacacatcaggtggtaaagagcaaataaagcagtgtagaagcacagagacttactgataaggcgtcttttgtgtagaggcctgacttaaataagggagagaacacccaacaattatcaaatgcactttttttttttttttttttgagacagaatctcactctgtcggccaggctggagtgcagtggcacaatctctgctcactgcaacctccacctcccgggttcaagcaattctcctgtctcagcctcccaagtagctgggattacaggcccccgctgccacgcctgtctagttttcatatttttagtagagatggggtttcgccatgctggccaggctggtcttgaattcctgaccttgtgatccacctgcctcagcctcccaaagtgctgggattacaggtgtgagccaccgcgtccagctgacgttattattattattattattattattattattattattattattattttgagatggagtctctgttgccaggctggagtgcagtggcgtgatctcggctcactgcaatctccacctcccgggttcaagagattctcctgcctcagcctcctaagtagctgggactacaggcacacgccaccacgcccagctaatttttttgtatttttaatagagacggggtttaatcatgttggccaggatggtctcgatctcttgaccttgtgatcggcccagcttggcctcccaaagtgttgggattacaggcatgagccaccgtgcctggccaacattatttttttaaaagctgtatttttattttattttattttttgagatggagtttcactcttgttgcccaggctggagtgcaatggcagaatctcggcttactgcagcctccaccttccaggttaaagggtttcttctgcctcagcctcccaagtagctgggattacaggcatgcaccaccacgcccggctgattttgtatttttagtatagatggggtttctccatattggtcaggctggtcttgaactcctgacctcgtgatctactcgcctcggtctcccagagtgctgggattacaggcgtgagccaccgcgcctggcctccagaacatttttatcatccccaaaagaaattcccaaacctattagcaaccactctcatttttgtctctcttcagcctctgacaaacactaatatgctttttttttttttttttttttttgagatggagtctacctctgtcgccaaggctgtagtgcagtggtgtactctcggctcactgcaacctctgcctcccaagttcaagagattctcctgcctcagcctcctgagtagttgggattacaggtgcctgccaccacacccagctaatttttgtattttttagtagagacggggtttcactgtgttggccaggctggtcttgaactcctgacctcaggtgatctacccacctcggcctcccaaagtgctgggatcacaggtgtgagccaccgtgccctgccgtgtctttcttcttttacttagcatcatgttttcaaggttcatccatgttgtagcattaatcagtacttcatttctgtttatggtgaatagtgttccattataggtatatacagcattttatccattcatcaggtggacatttggattgtttctccttttttgctgttatgagtaatgctgttatgcacatttatgtataaagttttgtgaggacatatactcatttctcttgggtctatacgtaggagtagaattgctaggtcatggggtaactctgtttaagcttttgaggaactcccagactgtacttcccacagtggctatcccatcttacattcccagcagcagcatatgaggattacagtttctccatatccttgcctacacatgttatctgattataggcatcccagcaggtgtgaagtgctatctcattgtggttttcatttgcagttccctggtagctagtgatgttaagcatcttttcatgtatttattgcccatttgtgtatcttccttggagaaatgtctagtcacattctttgctcattttaaaattgtattattcatctttttactatggagttgttctagatacaggtcccttatcaaatatatgatttgcaaatattttctcccactctgtgggctgcttttttactttcttgatgtggtccttcaaatcacaaaagcttttaattttgataaagtccagtttatttattttttcttttgttacttatgcttttggtgtcatagctaagacagctttgcattattttcaagtattcatggaacattaaccaaaattaaccatacactgggtcacaaaccaagtttcagcaaattttaaatgatcgaaatccattgtagcatgttttctgaccacaacagacttaatctagacatcagtaataaaaagacaactagaaaacccccagttgtttggcaatgaagcaggagagttttaaataaataaccaatgggactgggcatggtgactcatgcttgtaatcccagcactctgtggggccgaggcaggcagatcgcttgaggtcaggagttcgagaccagccccgccaacatggcaaaaccccgtctccactaaaaatacaaaaattagcctcacatggtggtgcacacctgtagttccagctacttgggaggctgaggcaggaggattgcttgaacccgggaggcggagttgcagtgagccgagatagcgtcactgccctccagcctgggcgacagagggagactccgtctcaaaaaaataaaataaattttaaaaaataattaatgagtaaggtagaaattgtaacagaaattagaaaatatttttaactaaatgataatgaagatacaacatatcaaacttgtgatgtatagctaaagctgtgtttagagagaaatttatagccttaaatatgtgcattagaaaagaggaaaggcgaaagtcaattatgtatcaatctcaaacactacaaaataattagcaagtaaagtgagagaatgaccatgtggctacctggggaacagagggagaaagacttggctctgttggggaggagcacgccttaaacaggctggctgtaggtttgcgtgggtttgtagcttagctctctgttaacccttcactagctgagggactttgggcaaatattttcctcctgagtgtctgtttttccatccataaaataggtagaaagtcccacctcctgagtttgttgtaagttttttgtttgtttgtttttgttttgagacagagtcttgttctgttgcgcaggctggagtgcagtggcgtagtctcggctcactgcaagctccgcctcccgggttcacgccattctcctgcctcagcctcctgagtagctgggaccacaggtgcccgccaccacgtctggctaatttgttttgtatttttagtagagacggggtttcaccatgttagccaggatggtgtttgttgtaagttttaaatgagtctacatgcaagcagtagtagcttagaacagtgctcagcaccaagtgggtgctgtcctaattatgaggattgtctatgtctttgtgagagtctttcacatctcacgggccacaagcctgtgttttccctgctctgtaggcatgaggcagggcccaggttccatgtgatgctgaagctctgacattcctgcaggcccagttccaaggctccggcatcctgtgtctcactgagcactgctgcccgatggccatccccaagcactccctgagcccagtgccgtgggaagaggacagcttccttcaagtgaaggtggaggaggaagaggaagccagcctctcccagggcggagaatccagccatgaccacattgctcactctgaggctgcacgcctgcgcttccggcacttccgctatgaggaggcatctggtccacacgaggccctggcccacctccgagcgctgtgctgtcagtggctgcagcccgaggcgcactccaaggagcagatactggagctgctggtgctggagcagttcctgggtgcgctgcccccagagatccaagcctgggtgggagcccagagtcccaagagcggagaggaagccgctgtgctggtggaggatctgactcaggtgctggacaagagaggtaaaggggcgccgtgggcagcttcacggcacaccagagatacaccctggacaggaacatgggagcacagggctctggtttggggttgctcatgcacccattctcacatttgtactttaccgtaactctcacacactgttgtagacaggtgtgttttggttgcaggtgaccaaaagcgagctgaaatgggctgaagcaaagaagggtaaggaggcagcagatacggctatatccagaagatctgttgacagcatcagaactctcttcttcctctcttgttctgtttctcagttggttttttctgtgttagcttcattcttattttaggttctctttccaaaggggttaaagatagccaggaaccccaggcttatgtcttaccaatgtagaaaccccggggtaataacaataagaggtccctggtctgagcccccactggcctggttgggatcttatgtttgtgtttggccaaccaaatcccagggactaacagtgagcaactggctgtttctcagaggaaaccagacgagggcctgggtgcctggggtggctgttgggggtgacggaaataccagatgtccctgtgtaccttctctatgcccaccctgggctggcctccaggatttgggtgggtcagacctgccccaggctcagctgggcactgttactcacagagacccacacaaacatcccaacccagggaggtccagtgggatgcagggaagacccagccttgggacaatccagagcagggagtggtggctcgtctcagatgggcttggcctggcctattggcaacagataggaggtgggcataccacacactgggaggaaacgtgcagtgtgcaggaggaatgtggagtctggatacagctgcatcatcaaggctcagtagatccaaccgctgctgctcttcctggccatgtgactcccttgtgcctcagtttactcatgggtaaaatggggattgtaataaaaacgcccaccttagtggtgttgcgagatacaaggcaatacccgtgcagcacctgaaatggtgcctggcacagattaaataaatggtaactgcaactgttaggataatttgttcagctctgggagaaacaggcctctctggaacagaggttggtctatgcccaagcagatgtcacagagacagggagaggaaggagggagtggccccatcctcccacagggttggccaaagctcagagaaagggtaaaatgcagagggaatggtggggtcaaaggcctggcagtgtgatttgcactggtgtattctggtaaaagcaggtggtgtgatgtttctggatagaggaaggaagggggagacagggccaagcagatggctgggggagcaggggagactgcctgtggacctggaggagaacattctggagctgaaatcccaactgggccactagctaactgtgatcctgtaccagttactcaacaccttccctcagctggatttcagtttccccatctgcaacagaatcacagcagtacctccttctgagagcaggtcgaagctgaaatgaggcgatggaagtcacccactgtgcttggggcccagcacgacaagagcctgatagtggttagtggccctggaaggccagcggcacagcatccatggcttacagatggggagactgagtcccagatgagggcaggactgattaaggtggtagacctggggtttgagtccagtttctgcactgctgagccccactgtggacttgagcagtgggtattccacctgtctctgcctcctccctggaatccatccagtagatgtgccagattatgtgtcctttgcacccatgcagggcaggtcagtgcgagcattcctctacctcatgcacactctgatctccaagagcacctccgccacactctgccttcatagtactttacaatgtaggggcttgagaggccagatgggtacctcatgtactcacccccagcagccatattctacctggggttctacttgcagaaattttcaccatcgtgggcttctggatggattccctcattcagccagaattcactgagcacctgtggacacatccaggcctagaggcaaggtgttgagtgtgagggacagaaccgcaacctcacagagatcagagcctgcaggggacacatccaggcctagacgcaaggcgttgagtgtgagggacagaactccaaccccacagagatcagagcctgcaggggacacatccaggcctagacgcaaggtgtcgagtgtgagggacagaactccaaccccacagagatcagagcctgcaggggacacatccaggcctagacgcaaggtgtcgagtgtgagggacagaactccaaccccacagagatcagagcctgcaggggacacatccaggcctagacgcaaggtgtcgagtgtgagggacagaactccaaccccacagagatcagagcctgcaggggacacatccaggcctagacgcaaggtgtcgagtgtgagggacagaactccaaccccacagagatcagagcctgcaggggacacatccaggcctagacgcaaggtgtcgagtgtgagggacagaactccaaccccacagagatcagagcctgcaggggacacatccaggcctagacgcaaggtgttgagtgtgagggacagaactgcaaccccacagagatcagagcctgcaggggtgcatgtgctcagggtcctgacaaggacagaccctccctctctctctgtctccagatcagttccacatcagggtttctcctcttgactcttgagccaaaattgggagccttgaaagatggcgagtttggtgggaggaggagaaatcagaacccatggtgtagttttggatggtgtgggaggacagccctgcaccctttgtcatccaagacaccaaatgagaaacttccccttggaactggggccagatgttaggaacgggccacatctccccttacaaagtgtgaccggggccctcggcagagtaggggaggcttggtgtggtaggaggagtgacagtgtggttcggactgtttcaggatgggatccaggagccgagcccacagaggcaagctgcaagcagagtgacctgggagagtcagagccatcaaatgtcactgagaccctcatgggaggtgtttcccttggacccgcctttgtcaaggcatgtgaacctgagggcagctcagagaggtctggactatcaggggagatctggacaaagtctgtcacccaacagatccacttcaagaaaacttcagggccttacaaggatgtccccacagaccagcgtggccgtgaatctggtgcctcgaggaacagttctagtgcgtggccaaacctcacctcccaagagaagcctccttcagaagacaaatttgatctggtggatgcttatgggacagagcctccatacacctactcagggaagaggtcctccaagtgtcgcgagtgtaggaagatgttccagagtgcttcggcgctcgaggcacaccagaagacccattctcggaagaccccatatgcctgcagcgagtgtgggaaagccttcagccggagcactcacctcgcccagcaccaggttgtccacacaggggcgaagccccatgagtgtaaggaatgtgggaaggccttcagccgagtcacccacctgactcagcaccaaaggattcatactggagagaaaccctacaaatgtggggaatgtggtaaaaccttcagccgcagcactcacctcacccagcaccagcgggtgcacacgggggagcggccctacgagtgtgacgcgtgtgggaaagccttcagccagagcacgcacctgactcaacaccagcgcatccacaccggggagaagccctacaagtgtgacgcgtgtggccgagccttcagcgactgctcagccctgatccgacatctgagaatccactctggagagaagccatatcagtgtaaggtttgtccgaaggcctttgcacagagctcctccctcattgagcaccagaggatccacacgggagagaagccttataagtgcagcgactgtgggaaggccttcagtcgtagctcagccctgatggttcacttgcggatccacatcacggtgctgcaatgaccggaagtcgcccctgggggcgtagcacagcgtcttctcggaggctcgaggtctaagagaaacgctgagttcctgaagagccacagacagggtgggtgattgatgagttgtcaaaatgataggtgcctgagggcagactcgggctgtctaggaaccactctgcatttgaggaaccctgatgagcacaaggtgattcaggccagctggagaagcttccagaagggccctgcactgctaccctctatttcccactcagggctgtcccagagagaaggcagccgaactgaggatttagactggttctgagggccagggcaaatgaaggcgcatgtctctcagaactcagcgtcccaagacgctctgggcgggccaactgtagcttgttctcatgtggttcttcttgcctgcttttctgctgcttagcccagaacggacacctgccatgcccacctctgtgccttggcacctactatttccactccagactattttgtgcctaactgcaaggctgacttttgagactgcctcttccacgatgccttttctacactctgcctctctcatggtttcctgtcgtaatcagtggtgctgcttgacacctgcccagcatgttcctgtctctccttttccttccacatcccaccagtcaccagcgctattgttttaacctaaagcttatctgtaattcacctccttttccaccactgctaccttatgtgagccctcattgcctcttgcctggattatagccggggtctccttcctgaccacttcctgcctttattctctgcccctgtatcactctccaggggactcttgatattacttagatctgactgtgtcactccaaggtggaaagctctccaacccatcttctacagcacagcttcctgaacagggtataagtatgctgagatgcaggctgctctgggccccgagcaacctctccagttatcctcatatgcatgtatgaatactgtcatttttctgtgcgtgcagtgaaaatggcctcatctcataccatggctccaccttccatacaccagccacacggaactactgtggtccctgaaggagccatacattttcccacttatgtgcctttgtacctgtgcctggaaccctcctcttctttttctttttcttttcttttctttttttttttttgagatggagtctcgctctgtcgcccaggctggagtgcagtggcgcgatctcggctcactgcaagctctgcctcccgggttcatgccattctcctgcctcagcctcccaagtagctgggactacaggcgcctgccaccacgcccagctagtttttttttttttttgtatttttagtagagatggagtttcaccatgttagccaggatggtctcgatctcctgacctcgtgatccacccgcctcggcctcccaaagtgctgggattacaggcgtgagccaccgcacctggccctcctttttcatctaaggtgtttcaaatgttgcccaaagaaacctccctgctctccgggagcagacttcagcttgccctctctgcttccagagcacctcctagatacctctcttacaactcctgccaccttgttttacttatttgctccttgtagagctgccttttccaaggataccataaactcctgagagcaggggccatgtcttactctcagtatctacaacacacaagactcagtaggccctgactgatgtctcttacatgaatgtgactggtgcccccaggaggcagtcaccgtgctgtctctgccccacattgtccttatgtatgtttacatggatgtctccccagcagcttgaaccctggagagcaagaataatctgattttcctgggggccagcacccaaataagcctggcatgcagtggcctcaataaaatgtgactgtattgagtcattttctagggccccagatcccctggtgtcatggacttagtctttgccagcattctgtccatgtgttctctggtcttctctcacaatgctgcatccctgtcccatttttagggtccctgtctatcactggatgctgcagcttctgttcattactgttagtgtatcattcttcatgcctctgtttctgtgatggtctcatcatatgtgaaccatttgacctggcgtattgtgtactagtcaccgtcaccatctctccatatgtatctccctgtatttcgggcccattccctctatgtcaagagtaaatagaggcacagagactgatgagaaacgttcataacatgaaggtaagactcagggagacagagactttgtggaagtatctctgagggagtcccagacacaggcagagagggccacatatcgtgtgccagaggctgagagactgagagggatgacaggcttaggggaaaactcagagaggagagatgcacattcctagtgaaattgcacaggcttccagcatgctggagggaacagaaaaggcatgggcctgaattcaggctgcagagcctgactcctccctgtggctacttttgggacctaagataagtgactttcctgaacctccatgacctcctcatatgtaaaccagggacaggacccaccttgtgtagtgcctgacccaaagcctggccctgcacactgtctctgactcacagcaatcatcagcacctctctttgcctcctacttgctcagtctctgtcacaagaactggatctccatccccttgatgctctgagcatcttcacccatttggtcgttgagacatatctgtccatgtctgtctaaaaggggaggagatgagggagaaaaaagggaatctactcagagcctgtgtgtgctgcccagtctaccaaataatttatatacatctcagtcctcacacaaccatccctgttttatagaggaggaagtggcttagagaatgtaactgaccaaagtcacactgccaggaactggaagcactaggatttgacagcatatccaaatatgtcagcaatttcaataaacatgactgtactcaacaaaccaagtgtaaagacaaattctaacagactgaatttctttttggaccagccatatgttctttagaaaagatacacctaaaacaaggatatgggaagttgagggcaaagggatagaaaaggatatacaaggtaggcatgaaactgaagaaagctgatggagctgcattagtcgcgcaaaacagacattaaggtataaaagcattttaagaatcatggggtcactatgtttttataaaagaaacaatctattaggaagatgtaatagttcaaaaccaggcacataatatgagtcttgtagaacagaatcacagtgagaaactgacgaaaccttaagtgtacttggaagtgctaacacgttctttatgatagaaaacatttgaagaggccgggtgcggtggctcccacctgtaatcccagcactttgggaggccaagacaggcggatcacgaggtcaggagtgcgaggcaagcctgggcaacatagtgaaactgtctacaaaaaatacgaaaattagccagcctgggccgggcacagtggatcacacgtaattccagcactttgggaggccaagacaggcaggtcacgaggtcaggagattgagatcatcctggctaatatggtgtgtaaccccttctctactaaaaatacaaaaaattggccaggcacggtggctcacgcctgtaatcccagcactttgggaggccaaggcaggcggatcacgaggtcaggagttcgagaccagcctgaccagcgtggtgacaccccgtctctactaaaaatacaaaaaattagctggatgtggtggtgtgtacctgtaatcccagctactaaggaggctgaggcaggagaatcgcttgaacccaggaggcggaggttgcggtgagccaagatcacaccattgcgctccagcctgggcaacagagcgagactctgtctcaaaaaaaaaaaaaaaaaaaagccaggcatggcggcacacgcctgtagatccagctaatcaggaggctgaggcaggagaattgcttgaacctgggaggcagaggttgcagtgagccgagattgggtgacttcactccagcctcgacaacagagtgagactctgtctcaaaaaaaaaaaaaaaaaggctgggcacagtggctcacacctgtaatcccagcactttgggacgccgaggtgggtggatcacctgagttcacgagtttgcgaccagcctggccaacatggtgaaaccccgtgtctacaaaaaattagccgggcgtggtggcgggtgcctgtaatcccagctactcaggaggctgaggcaggagaattacttgaacctaggaggcagaggttgcagtgagccgagattgcaccattgcactccagtctgggcaataagagcaaaactccatttcaaaaacaaacaaaaaaaagactcaacccagaattctttttttttttttttttgagatggagtctcgctctgttgcccaggctggagtgcagtggtgtgatctcagctcactgcaagctccgcctcccgtcaacccagaattctatatccagtgcaaacacacttaaagaacgaaggcaaaatacagacatcctcaaatgaaacaaacctaagatatatatttcttgccagcagacttgcctgaaaagaaatgccaaaggaaactcttggtagaagggaaatgataccagagggaaagcgggaactttgggaattaaatgatagtaatagagattgcacaattattttatctttaaaatatggctggaggcggctgggcgcggtggctcacgtctgtaatcccagcactttgggaggctgaggtgggcggatcccaagggcaggagatggagaccatcctggctaacatgttgaaaccccatctctactaaaaatacaaaaaaattagctgggcgtggtggtgggctcctgtaatcccagctacttgggagactgaggcaggagaatggcatgaacctgggaggcagagcttgcagtgagccgagatcacgccactgcactccagcctgggcgacagagcaagactctgtctcaaaaaaaaaaaaaaaaaaagaaaaaaaatgtggctggaggccaggtgcagtgtaatcctagcactttgggaggctgaggtggacagaccacttgagctcaggagtttgagaccaacatggcgaaatactgtctctactaaagatacaaaaaatgaccgggtgcggtggctcacgccagtactttgggaggctgaggcggttgggatcacaaggtcaggagtttgagaccagcctggacagcatggtgaaaccccatctctactaaaaatacaaaaaactagccgggcatgctggtgggtgcctgtagtaccagctactccggaggctgaggcaggagaattgcttgaacctggcaggcggaggttgcagtgagccgagatcacaccactgcactccagcctgggcaacagagtgagattcgggaaaaaaaaaaaaaaagcaaaagcaaacaaacaaaactcaatagtaagaaaacaaacaggccaggcacggtggctcatgcctgtagtcccaacactttggaaggctgaggcaggtggatcacttgaggtcaggagttgaagaccagtgtggccaacatggtgaaaccccctctccactaaatatacaaaaatcagccagtgtggtggcacatgcctgtaatcccagctacacaggaggctgagggagttgaatcgcttgaacctgggcggcggaagttgcagtgagctgaaatcatgccactgcaccccagcctgggcaacagagcatgactctctcaaaaagaaagaaaagagaagaaaaaagaaaagagaagaaaaaagaaaacaacccaatattttaaagtgtgcaaaatatataaacagacatttcatcaaagatgctatatagatggcaactaagcacttggggaaaaaatgcttaacatcatcagacattaaggaaacgcaaggaaaaccactattagatatgtctacatacctattagaatggctaaaataaactttttaaaaaactaagctggggctgggcgtggtggctcacccctgtaatcccagcactttgggaggctgaggcgggtggatcacttgagctcaggagttggagaccagcctggccacccaacaaggtgaaaccccatctctactaaaaacataaaaattagctgggtgtggtggtgggtgcctgtcagcccagctactcaggaggctgaggcacgagaatcacttgaacccaggaggtagaggttgctgtgagccaagatcacgccattgcactccagcctgggcaacaagagcaaaattctgtctcaaaaacaaataaacaagaaaaggttttaaaaattgataaaccactagcaagaaagagagagaggacacatcaggcttgagagaagtgacatcatcatagactgtgcagacattaaaaggcataggcatattaggaactagatattactaaggcagtaaaccagatcactagcaaattcgttgaaaaacacaattcatcaactattggttgataatactgatacgcatcttctgtgtgccagggccttgaggccctgctccaggcagaaactcggcagtggttgggaaggcatcagatgtcagatggcacaagaggactcagagctgagggataatgggaaagaacacagaggaatccagccatttccacagcgtccagctctgctgtgggaggctgggaacagcccagcactaccaccctggactgggaggacaagaccacaaaatgcagcttccctgaacctcctcttggtgatggggttgatgtggtcgaggtagaggtgagtatgtctggagcctcaagcaactgcccatacctgctgggaccaggccgaggtgcccagggagtaagaggcagcatcctggaagagcacagatgaaagaggccctgagaagtgttggttggccaggtgctgtggctcacacctgtaatcccaacactttgggaggctgaggcgggaggatcacttgagcccaagagttcaagaccagcctgggcaacatagtgagactcatctctacaaaaaataaataatagaaagaaaaatgtgagttggccaggcatggtggctcatgcctgtagtcccagctactcaggaggctgaggtgggaggatcacttaaggccaggagttcaagacaagcttgggcaacacagtgagaccctgtctacaaaaaataataattagccagacgtggcgatgcatgcccaggctcccagctacttgggaggctgaggcaggaggatcgcttgagcctgggaggtcaaaactgcagtgagccggactgcaacactgcactccagcctgggtgacagtgtgagaccctgtctcaaaaaagaaaaaagaaaagaaaactgtgctcttaagagccagttctccactcctctacctcaggagccaccccagaacccatccactttgaggacacgagatcccagcccactcagccctgggagtccaaagacattttaaacagagcctctcttcacatttattaattcctgggaggaatgagggaggcttctccagccccccagagaccccggccttgtgctgcaacaggaggggagggagccagtccagaatccccggcacttctgaggacaccaacagcaccctgggcccgcggctgcatcagctttctagacaacgggagaaaagagaaatggtggaggaggggaaatcctatgccctcctcctcgcggaaatcaaggccgacctccctgacgcccccccggaaggaagcgcgtggtcggctgccagccgagacccccatctgcgcctccagctgcagggcctttgctgggcggttcctcgcccgcaattcccccacgagccctggggagacccagcgctaaccaggggtgcccaagggaggagccgggagaggccctcctggaggtgggcacagcccaggcaaacatcagcagacggaaccagcacccgggacccagggaaacgtcacctgccaccaggagctccacagggtcgctgagctccgattcgaaggtgtggggcacccaggagcggtagcggcacctgtagttgccggcgtgctggggccccacgaagatcagctcgaggttcgccgcggccccgggggtgcggaccgtcttcacggccttcgtctcgccctcgcgcagcagctcgaaggtgacgtcggggatgggtccctcgcagcgcaggacggcatctcggcccgccaggaccgccccactccacgtcgcccggagctgaggcctgggagggggtcctgggcggagcgggcgggtggtcgggccaggccacgccccaggccacgccccaggccacaccccaggccacaccccaggccgcgcccgcgcctgcgcctcagccccggcttcatcttccctgtcttgttcctgggcgcagagggctcctccggcgccgccgagctgcgcccgctgccttcacaccccggacatccgcgccacacgtgagtgtccccgcacccctcccccaggaccgtggaagtcccagattcgggcctgctctggggcttctggggtccccagcctcggtcactctgacgggtgaagggaagaagaaatgatggagaaaacggtgctccttcatggagggaccaaaaaaggacatacaatctatgtcaatagatgagggttttccctccataagtttaactttaaaagtgtatttaaggtgccgggcgcagtggctcacacctgtaatctcagcactttgagaggccgaggcaggcggattgcctgagctcaggagttccagaccagcctgggtaacacggtgaaaccccgtctctactaaaatacaaaaaattagccgggcgtggcagcgtgcgcctgtaatcccagctactcgggaggtggaggcaggaaaattgcttgaacctgggaggcagaggtttcagtgagccaagattgcgccactgcactccagcccgggtgacagagtgacactccgtctcaaaaacaaacaaacaaaacaaaactgtaaggaatcaaatgttacaaaatcctggaagattttggtaatgctgttgataatttcagggaaattaatgaagtacatgtaagtgcttgatttaaatgtgtattttattcaatagtttgagtatcttgccatggaagatactagcccagcctagcagaaaagtgcaatatgtataatatactttcgcattttaaaagttatattccctatccattttgaaatgctagccaaactacatgaagttatttgcaattaattgtaagctaatcaggaattttgaaagcttgattggattaacaaactataatgttgaaatttggtaaaatcataatgttaatttttactgtgaaacgttttcttgtaagatagatatacacatcctagtttaattttgtgtcttagtgtggatttacaaatttactacagttattctgagcccaggaacccaatcagatttcaggccagtttgatactggctgttcttaattctaacaggagagtaggacatcatactaaatgttatgtcagtgggactgtgttgtctttggagcttagtaaattaatcattttcttcagactttaaggagagtgataaataaaatttggagtcataggatatagatgtacaatttaaagattaaacattttttttttttttgagatggagttttgctcttgttgcccaggctggaatgcagtggcatgacctggactcactgcaaactccacctcccgggttaaagcaattctcctgcctcagcctcccaagtggctgggattacaggcatgtgccaccacagctggctaattttgtatttttagtagagacagggtttctccatgttggccaggctgctcttgaactcctgattttgtgatccacccgccttggcctcccaaagtgctgtgattacaggcgtgagccaccttgcctggccaagattaaacatttttcatcaattgtggatggtggcttataacactgcaagaataggctgggcatggtgactcacaagtgtaatcccagcactttgggaggcagaggcgggcagatcacaaggtcaggaggtcaagaccagcccagccaacatagcaaaacccggtctctactaaaaatacgaaaattaggtgggcatggtggcatgcgcctctaataccagctactcaggaggctgaggcaggagaactgcctgaacccagaaggcgaaagttgcagtgagctgagactgcaccactgcactccggcctgcaagaataaaagtaagttatccaaaaaaaaaacaaaaaggagaagaaaagggaggaatgaaggagagagatggggttggggggcagagatgagagagagagaaagaagaaaaaagaagaaagaaaagagagaaagaaggaaggaagaaagaaagaaggaaagagaaagaaagaaagaggaaggaaggcaggaaagaaaagaaagaaagtgaaagaaaagagaaaacggtgctcccagcaaagggtacgacctcaagatctggaggtcagacctgtgccctcacgctctgctgggctctgagtcctggagacgtcgatgaggaaatcagagggacaaacagagctggggacggcggggatggggagaaggacacatcagccgtgcgcctgcgggaccggggccggggcggggggtccagtatgacgactgacatggccagtaataaaacaaggcagccacagagctgcagggatctgaacaagaaaacctggggccagcctccctgctgccgaccaccacgctacacgtgacctacgggcttgcgtccgtgggaaataagccgaaattccaggcgtccccagaccctcgaccaccgatcgcctgctccccgccggggtaggcgatgggggctgaaccaaggcccagagcgccgccgtcggacgcccaaggaaagaggggaaagacaggaggccccgaggggcactgaacccgcgcccgccctcgctggtgccccgccagctcaccgtccacgtgcagctccaagcgctcgctgggcgcggagcccccgaaaggcggcttcaggtccacgtagacgcagctgtagttggcggagtcagccacggaaatgttgtgcagctcgaagagcgcctcggtcccagcggggctctggaaacggtgcacgcggcgcccgcccctgtcctcgcgcaccagggcgaagcgcgcgccctccaggggcgccaggcaccgcagccgcaaggccctgccggactccggctccggggagaactccggcgcgggcagcgtctctgcggagcagcacacgggctgacccgggcgcccagcggctggctcggccctaacgcgtggtctggcctcgcgctctttgccttggctgagtcttctgcccgcaatgacctggccagcttcctccctcgcctcctccgggcccgccccacctttgcatcccagtccttggatatctcacacgcaccctttcactgtttcttagtaatttgtttgtctacagacacagacgggaagcggggacggggacatgttttgtgcatggcttgatgcctggtgcacgatgccgctcagtagtggatttgctccacgagcgtcttctgagcaccgccccaatgcccgccccacggaggggcccctgtggtccgctgggcatggggttcgctgtccggtgctcagagtttgctaaataccatcaggtccaaggcaagcgagcggaggagctgcctcagcagaggccctcagtgctcacctagacctggcagctgggatgggacctgccaggtggtgccccctgtggcctgggccagacctgttcacccagttattccctgtggggcctgaaggttgtcacgctcatcatcatatttgcagtttaggaccctgaatcggcgggtgggcggataaagttggtattggaccctggcccagagcactgcacttccccagactctacacctggtactgctcctgctccccagggacccagccgcgtccctgtccctgctggccccggctcaccatcgctcagaatcagctcgaccggcgcgctgtccccggaccagccgttttggttgtcatgcagccggtagcggcaggtgtagtgacctccatcccccagggccaccgcgttcaggtgaaagaagatgcgatctgggctggtgctgctcctgggtaccagcagctctttctccccgcgccgtagctggaagtccactccactcaggggagccacgcaggtgagggtcaccttgttgccagggtgcaggacctgggaggactctccatggtgcatcagcacaggcggtggtggtgcagctgcaatgcaggcagcattactaggctgccccatccctggagctgccctctgcccagtccccagacctctgccctccgggtggcaatcccaggaacacccttccattcttttttttttttttttttgaaacggagtttcgctcttgttgcccaggctggagtgcagtggcgccactcagctcactgcaagctctgcctcccaggttcaagggattctcctgcctcagcctcctgagtagctggtactacaggcacctgccaccacacctggctaatttttgtatttttagtagagacggggtttcgtcatgttgggtagactggtctcgatctcttgacctcatgatccgctggcctcagcctcccaaagtgctgggattataggcgtgagccaccgcacccggcctcacccttccattctttgggcatcctctgcccaaactcctttgcaaccatcagacccaggcaaccgtgtggccagcttcctggacctggtcctgggcaaggacattcagcatggaggtcaggatgaatgtggtcatgccccctgtatcctcctcccccagcagcccccagagatggttcccacagtcaccgagctcctcaatggtcacagtagcgctgggctcagagagggcgccttccccatcggtccggtagctgcagctgtagttgccaggctgatggactggaaaggtggcctccacatcctcctgggcctcaggcacctccagaaactcatggtcgccctcccgcctcagcagaaaagtcacaccccgcagcacacctcggcacactgctgttgttttcaggccgggggtgatccaggacactggcgccatcgagagccagggagcaggcaaggactctgtgggtggggtggagttgaagagtgcttctgcataacaggagacgtgggaagcccagcagaacctgggccccacactcataagactgtgaaggagacagggatggagggcattgctgggaaaaggcaggcaggcaccagtggaaacaaggcatacggcaagagaaaaagagtgtgtgggagctgtacggcatgccgggcctgctggggacacaaccatgtattccttacaacacagacatcatccccatttgacagatgggaagattggggcttggggctcagagacatcgggtgacttggaggaagggagaccccccagtcaacaacctacccactgcctcctggcccccaattcatgccccggctcacttggccctgtcagctccaggagcttgctcagctgggtccatcctgtggacaagcccgagcggcagcggtagcggccctgggtgtcacccgtcagcaggaactggtgcttgatggcaggtgagtcaaggtgcacaggctcctgggccaccccattcttgaacagctggaagtctggagtctccaggtgggcctggcacgtcagcgtcacattggccaagggtttcagcagtgattcggactctgcccacaggctgggctgcgtctcataaactgcaaggggtggctgggatcagctcagtgccacagagacagggctcccccccggcctgggcccaccattcccagacctcacccctgcactcacatatggctgcttctgtcactgggccccaggtgacacctgcggagacagcccccgtaaggctcctgttcccgccccctcccgccccagggacccagaccccaggaggcctcaccccacagcaagagaaagaccacgagcatggacatgatggtcgcgctcactccggtgcagtgagtgtctggggtgagcgtctgcagcaatgaggccccaagggagggcggtggggtggctcgggcactgacctcttcccgtgtttgtccttcccggaaggcgggggcagggcccccatggggtcagggcaaagggtgaacttctgaggcctcaggatgcccagcaacaattataatcaataatcatgtatgattaataaactaaatcaagagtgataaaatgatgttaaaaccacctcatcctcatttcagtgatggatcctagaacctgttctagaaggagacgctgagttctccccactctacctggagctgctgaggtcaagtggagagtgccggggctgaagcccagcgagcccctccctgtcacaccacactgcacatgtgacaccaaaggtggggttcacctcttttcagactttctgcggttgccctcacatgggctgtctggaggtgcaccctcactcttcctgaggactgtggttccttctccatcactggttcattctgcatggtgtgacccaccacggctctggagtcggatttccacccaggtcattcagctgagacctgcgcttcccaggcctacccgtgacatgtgctcagttacctgagctgctggtggtcactcatgtggctatagcctgctgcctggaggccaggcctcccgcttcccctgcctccccctctcctcaccacagcctgttgggatggaacaggacaggggtgagaccgtggtgctttcacactcagcctccatggacatcctgtcattcccacccggggaggtctggtccccaccctgggtgtcccagcctagctccgctacgagtgtgagggcccagggcaaccgcctagccctcatctgccccctgcactgcatcctccccactcattcattccacaggcatttattgagcatctactgtgtgccagatgcaaagaagacagtgggataactgggcaaggagcattccaggcagagggaacagccagtgcaaacatgggagatgcgggtgcagtgagaaggagcagaggagaccaggagttgaggcgactgcagagcgattgcagagctcatagacgtgatgaagaccagctgggcactgcagcggctctggcttctgctgtgagggacggggagctgtggagactccctctgtttggtcccatttccatattgctgagcacctgctgcatgctctctgtcctgctcagagccagtacctggatggaggctgtgtgttctgggtggactgggggagaatgcattctttgcagaagagacaaccaggtgctgaggcctgaagtcataaccagacctggggcactcagacaaggactggtggccaggccagaggagcagagctcagggtgtgcacagaactcagaagtcagaccactgaacagtgacagaacctttcagcccattggcaatgaggctgcccaggcagccagaggcctggtcaaatctgaggtctgcagagatggagctgtcattctgtgtttcctttggcagtcccaacaccagcctcgttgcaccctcctcttagcttccctgggttctccagccctaagggtggtagcagcttcctgcaagtatccagctctgagattctgcaacatccacttttgctctctgagccttgcaaaacctgcacaatcagtccctaacttatatcccctctgtttgaaatacctagtgtggtttctatttcctgacttgactctgactggtgtggtacttggtataaagaaggttccctggccaggtgcggtggctcacgcctataatcccaacgctttgggaggctgaggcaggaggatcacttgagcccaggagttttgagacccgcctaggcaacatggtgagacactgtccttacaaaaaattttaaaattagccaggtgtagtgacgcaagtctgtcatcccagctgcttgggaggctgaggtgggaggatcacctgagcctaagaagtcgcggctgcaataaacagtgattgcaccactgcactccagcctgggtgacagagtgaaaccctgccccctcccccaaaaaagaaaagtcccatgaaacagacctacacaggtgagattctgagattgatctggttctgacctcggtcaggaatgcagtgctgagcttcttgccaacagaatatgagacactagaaagccatagcatgcggtttcatcatgtttaactgtcacctgtggttgcctgagatgaagtgctgactgaagcgagcaccttaggagacacagtggccactgcactgagcagctggtagcagcagtggtgaccatgtggactggggggtgggttggctgcttttgacagtgccagagaactcaaagaaatagccacacctgtcggagaccccagttcttgcccacctctgcatggacgaacctctcgccgaagtggagcctgccgccctccctggggtaagagcccatcctacatgtccccagacaggcctgggtggccggtggactatcgtcaaagggactgtgcagccagggttctccacacccaaggccgcccctgcactcccagcaggagggcgcccgcaccggcggcccgaaaaagtctgggccagcagacagcgcactcacgcccgagaccccgcaatgccgtgtgtccgcgacctcccgctcagggcgtcctcgggtcagggcgcagcgcggcccccgtgccgcttctggtgctcgttgaggttgcaacggtggctgaaaggcttcccgcactcgccgcaagcgtagggcctctcgcccgtgtgcgtgcgccggtggcttaagagctccgacttgcgcacgaaggccttgctgcagtgggcgcagacgaacggcctctcgccagagtgcaggcgctggtgctggcgcagctcggagctgccgcggaaggccttgccgcattctgcgcaggcgaagggtcgctctcccgtgtgcgaaagccggtggtgcgccaggccggaactgccgcggaaggccttgccgcagtcggcgcaggcgaagggcttggcgcccgagtgcgtgcgccggtggctcagtaggttggagcgctggctgaaggccttgccgcactgggcgcacgcatgaggcttctcgcccgtgtgcacgcgccggtgctccgccaggtaggagcccatgacgaaagcctggccgcactcggcgcactcgaagggccgctcaccagtgtgcgtgcgctggtgctgcaggagctgcgagctctcgcggaaagcctttccgcactcggcgcaggggaagggcttctcgctgctgtgcgtgcgccggtgctgccgcagccccgccacacgcacgaaggccttgccgcagtcgggacaggcgtgtggccgtgcgcccgcgtggatcttcaggtgctcggccaggttggagctctggctgaaggccttgccacagtcccggcaggcgtgcggccgcgcgcccgtgtgcacgcgccggtgctccaggaaattggagttccagctgaaggccttgccgcactccgggcactcgtagggcttctcgcccgtgtgcgtgcgtcggtgctgcaccagcgtggtgcttcggccgaaggacttgccgcagtccgggcagcggaagggcttcaggccgctgtgtgtctcctggtggtggatgagctgcgagtgcgcgcggaaggccttgccgcactccctgcaagcgtagggcttctcgccgctgtggatgcgctggtgctggctgaggttggagctccaggcgaaggccttgccgcactcggggcacgtgtacggcttctcgcctgtgtgcacgcgccgatgctgcagcaagtaagagccctggctgaacgccttgccgcactccccgcaccggcagcccggctcctctgggagaggcgaagggcgcaacgcccggtctgcaggctcgctcctgggcccagccccgtcccgcccaccgtctgcggggcccagctccctgccggggcctccctgttcgtccgccgcccccagtgtggcttgctgccgctggccgtcccctgcctccctcggaacctccgtggagttttcccaggccccccagcctccagacacagccccctcagagaggcccctcgtggcagtcttcacattgcagaggacctggccttcctctggggccacctgcagggtccaccctcttggggactccatctcgcgcctgtgacctaaaacaggagagaaaaggcaagtaccttagagaatacaaagaacaccagacagagggcctgagggggacacgacggtgggtgggctgtcatcccccactcttctcctccaggtccctggatgcccaatgccctctggagcctggagcaggaaggccagcaggcgggctagacactcgggggatgggccagcactctgggcctgcctgacagggccacgtgcacatccccacacccggcccggcccagcaggaggggagggggcgccagcatcgcagaaggactcaaagttgcccacgcacctgcactggccctactgtggcaccactctcctctccttgcttcacagggtggggccccaagtgtcaagaaggtggagactccagtttgtgaggaacacgatggacccgtctccattcctgaaggctggaggacaccgcctgacccaaacacagctatgtctgcctcacccactccaccctggccggatccctgggtagtcccctccacacagtatgggcagcatgtccaggctggaggatctcagtggctgttacccaggcaatgtccacaccaggcctctgtgcaggtcagaccaggtggtccaaggcatggggtggctgtgcagcccagatccctgagagagagagaggccaagggtgggagggcctccttggtcctaaggccatgcctgcctgtccagccgatccttcccacagcgaagtctctacagcgagcaaaacccatcctcatttgccctgagcaccttatcatccttgtgtagtctccagccccgctgccaaggcagggcagggacaagtgtgtagatggtgccatacctggaggtggggcctggaaggggcccaggggagcctcttgctcctctccctcctctgtcctggggaccagctcctcttggggcctgggggctggcacctggggacaggaaggcagcagggcagggtgaggtgttcagcctagcagatctgagaaaacaaggggcatgcggtggcatgacccacccttctctgcaccttcagttctcaggacacaatgcggagcacacaggtgtggactggagatctctgactctgccgtccaagccaagaccaccaaactcccacctgtcaccatcactttcccacagcccccaggccctctcagccaccaacccacgactggccccagtgctggctcagctggggtcgtgagcaggggaagcacacccagcccccagaccagcccccactcatctggagtcctggcccagctgactcctgctgtagccgctctgccagggcagtggcctcctcagggctgcctagccactgctcctgcgtgtaggcctggatctctgggagcagtgtgcccaataactgctccagcaccaagagctccagcatctgctccttggagcaggcctcaggcatcagccactggcaacacagctcacgcagctgagccagggcccctcggggccctgctgccttctcatagcagaacccccagaagcactggccagggctcttggagctgggctcacccaccatcagttccagtggactcgggaagacctggggggccagggctgatgcctcactcatctgggcagccatcctgcccctttcctgggaggggagtgcagctgcatggcccagggtactttctctgcagctggaaacacaaaggtgagcctgtgagcacagcaaggccacgaaggtcccctccttgggaccacctgagactgagtaaaaatggaagaatgggggtatcggcgtttctggcccccagtgtcagcatctttgcccacctgtgtgtccaggtgcctgagggacacactgaggtgccatggctgcttgtaccatcccttccccccgcctccccgcttttcttgagggtccctgccctgccctgtctccttggcacccttcatcccacacacagaacaactaagacagagactgtgaacaggacacccagagtcagaccagcagatgggtcctgtttgtcccctccaggaagtgttttaaaaatttaagttaggccaagtgcggtggctgacggctgtagtcctagcactttgggaggccgaggtgggtggatcacgaggtcagcaattccaagaccagcctggccaacatggtgaaaccccgtctctactaaaaatacaaaaattagccaggcgtggtggcaggcgcctgtaatcccagctactcgggaggctgaggcagagaactgcttgaacccgggaggtggaggttgcagtgagccgagatcgcgccactgcactccagcctgggtgacaaagtgagactctgtctcaaaaaaaaaaaaaagagaataaatactgatacatactacaagatggatgaatcttgaaaatattatgctaagtgtaaatgaaaaaattcagacacaaaagacttcatattatgttattccatttatgtgaaatgtccagaacagataagtctgtaagagacagaaagtagatcagcggttgccaggatctgcagggaagagagaaatgggagatacagccgtgggagtgatgaaaatattctggaattagtggtgatgactgtgcaacactgaatataccaaaaaccactgaattacacactttaaaaggatgaattgtatggtatttatgttttttaaaaaagttaccacccaatcccaaaagcttaaaaactgtatgactccatttctttttctttttctttttttttttcttttgacagggtctggctctgtcatccaggctagggtgcagtggtgcaatctcatctcccaggctcaagccatcttcccacctcagcctccgaaggagctgggacatcaagtgcgtgccaccatacccagctaatttttttattttttatttttctatttttgagacggagtttcgctctttcacccaggctggaatgaagtggcgcaatctcggctcactgcaacctctgcccccaggattcaagcgattctcctgcctcagcctccccagtagctgggattacagatgcctgccatcaggcctggcttattttattttattttattttattttttagtagagatggggtttcaccatgttggccaggctggtcccgaactctttttttttttttttttttttttttttttttttgagaagagtcttgctctgtcgcccaggctggagtccagtggcgctatcctggctcactgcaagctctgcctcccgggttcataccattctcctgcctcagcctcccaagtagctgggactacaggcgcctgccaccatgcccggctaatttttttatatttttggtagagccggggtttcaccgtgttagccaggatggtctcgatctcctgacctcgtgatccgcccgcctcagcctcccaaagtgctgggattacaggcgtgagccacggcacccggccggtgggccggtcctgaactcttgacctcagatggtccacccgcctcggcctcccaaagtgctagtattacaggcgcgagacacctcgcccagcctatgcaacattcgtaaaatgacaaaatggtagaaatgagaacagattactagttgacaaaaagaggttaacggggagcagaggtaggagggaagggtatgcggctctgtaagggcaacacggggatccttcgtgatggaaatattctgcatctcagttgtgatattgtactctagtttttctttctcttctctttttttgagacagagtctcgctctgttgcccaggttggagtgcagtggcgtgatgtgggctcaccgcgacctccgcctcctgggtacaagcgattctcctgcctgagactcccgagtagctgggattacaggcaccagcctccacacccgcctaatttttgtgttttcagtacagatggggtttcaccatgttgctcaggctggtctttaactcctgagctcaagggatccacccgccttggcctcccaaagtgctgggattacagacatgagccaccgcacctggcctctagtttttcaagatgccacctttaggggaattgggtaaagcgtacatagggtatgcattacttgttactgcatgtgaatttataattacctcaaatcaaaagttaaattttaaaaaaacgacatctgatttcaataaaaatccatatttgtgtattgaagtatcagaaatccgggtcccccaagggcccatgtttcttaaggcggagccaggcaccgctgcccctccatcctgtggtgtgcgaccccgacccgccagcccccagccgcatctatcagggctgccgtcctgagtccgtcctcgtcgtgggatagcatgtgagccccgtaaggtccttcctgtcggcctcactgctccagcctccccgacgtcctcacgtccacgctgcgtgccctttctgagcctcaacgcctcctcctcacctcgacatgatcagagccacctcccgcgtcagtcccagcgcccacgcccccaacaacgggcacttgtccgaccagtcacgggtacttgtgtctcccccacaacccccaaggcctaggctggacaaacaaatacggagtggataaaggggaggaagctgcggccaggtggcgcgaggcctgtgcgggcagctccggaggctgggaggcgagcccagcctggtgagctccgaaactacccggggctggggactgatgaacgaataaatgaatgtgggaagaaatgatggcgcggcagggcatgagtgaatgagtgaaagaataaacgagcaggaggaacgatgccacagaactgatcgccataaggctcgcgttcaccgagagaacagcaaacgggagccatttccgtcccgaccacggtcgcctctggcccgtgcagggccacttccgggccgctctggacggcgcggaggcctatctctcggtggtcccagagggcccagctcagggccgaggcccgtcctgccccgcgcggcgggagtggttggagccggagggcggatctgtgcctggccgagggtgtccgtcggcgtcactcaccgtcctcggcccgcctctgcgtccactaggagcggcctgaaagaggcccgcacgcgggctcgagccgcgtggaatggtaggagggcgggcaccgggtctcctgggggcgcggttgcattcggcagagcggcccaaggcgtcgcgtttctccccactgcgcctgcgtaactatgccgcggctgcgggcgcgcgccttctggttcccatggggacggcgccacagccaagctactcgggcgtcctgcgttgccatggatgcgctccgccccttcctgcacccggccagcctctgcggcacacacccaacagctacacaggcgcctggggctgcccgggtcgcggacgcaagtcgggccaacgtagcttctccctggcggtcctcctccggccccaggccgtctttaccaccctggaaccttgctgagttgacgccactgagctgcgtctcacacccacgcgctgtggaacacccaccaagctggaatccacgcggtttttaaaatagagtcgggggccgggcgcggtgactcacgcctgtaatcccagcactttgggaggtcgaggcgggcggatcacgaggtcaggagatcgagaccatcctggctaacacggagaaaccccgtctctactaaaaatacaaaaaattagccgggcgtggtggcgggcgcctgtagtcccagctactcgggaggctgaggcaggagaatcgcttgaacctgggaggcggagcttgcagtgagccgagatcgcgacactgcactccagcctggggcgacagaacgagactccgtctcaaaaaaaaaaaaaaaaaattgagtcgggatctcagaagctaagcagggtcgggcctggttagtacttgggagaccgtctgggaacaccgagtgctgttggctaaaataaataaataaaccgggcgcggtggctcacgcctgtaatcccagaactttgggaggccgaggcgggcagatcacgaggtcaggagttcgagaccagcctgaccaacatggtgaaaccccgtctctactgaaaatacaaaaattaggcttgttggcgtgtgcctataatcccagctactcgggaggctgaggcaggagaatcgcttgaaccggggaggcagaagttacagtgagctgaggtcgtgccactgcacactccagcctgggtgacagagcaagactccgtctcaaaaaacaacatagaccagatgctgtaagctaaaataaatgaatagctagagacggggtctcgctatatggcccaggctggtcttgaacttctgggctcaagtgatcctcccaccttggcctcccaaagtgctaggattacagacccgagccactgcacccggcctccacgagctctttttgtaccaatttttcccaatttgtactagggagctctcacctcagcccaggtggtttgggcaggtgtgggtacatggcccaggtccacagcacagggcagtccatccctctggccctggcagtggtcactttggacctgtgagcatcgtgggacttctctctgaactgttagggcctctatctgctttgaacctgaggctgtgagcatctgtcagctggggcagctgcagccttcttgccccgctgaaggatgaatctgttaagagaatggagtccatacagaaaagcagaactgagggatggtgtgttagtttcctgtggttatgcagcaaattaccacaaatttggtggcttaaaacagcagaaatatattcccgcccagttctggggaccagaagtctaacatcgatatgactgagctgaaacaagatgttgacagggctgagctccctctggaagctctaacgtagaacctttccttgcctttttcagcacctagagctgcattccatgtattccttggcttttcgtcctttcctccatcatcaagtaactggtaacatcttactatttctctcattaagttaaaatatttaacatatgttcattttatcttatttgcatgagagtcaattttagctttaaaaaaatttttattggccgggtggggtggctcaggcctgtaatcccagcaatttgggaggtggaggtgggcggatcacctgaggtcaggagttcgagaccagcctgaccaacatggtgaaaccccgtctttactaaaaatacaaaaattagccgtgtgtggtacatacctgtaatcccagctacttgggagactgaggcaggagaatcgcatgaacctgggaggcagaggttgcagtgagctgagatcatgccactgcactccaacctgggcaacagagcgagactccgtctcaagaaaaaaaaaagggggggaggcctgggcgcagtggctcacgcctgtaatcccaacacttgggaggctgaggcggggggatcacgaggtcaagagatcgagaccatcctagccaacatggtgaaaccctgtctctaccaaaaatacaaaaattagccaggcgtggtggtgtgcgcctgtagtcttggatcacccatgctggaagaattcagctgcccggacatgaggaaactcaggtctgcagtcctgtggagaggcagtggagcagtgcatactccaagcccagtggggccttcagatgattgcagtcttggctgccatgttgacttcaacctcgtgagaggccttgagccagaaccacaggccaagctggtcacgaattccccacccccagaaaatgtttgcgatgataaatgtttatttatttatttatttatttttgagaaagtcttgctctctcacctaggctggagtgcagcggcgcgatctcagctcattgcaacctctgcctcccaggttcaagggattcttgtgcctcagcctcccaagtagctgggattacaggcacatgccaccatgcccggctaatttttgtatttttagtagaaacggggttttgccatgttgcccaggctgttctggaactcctgagctcaagccatccgcccaactcagcctcccaaagcactgggattacaggcctgagccaccacgcttggcctggagcatgcccttgatgtgcaaactaaccaatccagagcctcacccctctacctggtccacacaccgcaggagacagtattcctctgtcttaatcatccccggaacaggagccaagcagctggggaacactcccacagctgaaagcccacaggaattactccagctagccagtcctgtgctgtaggctctgctctgccttgcttttcccttggaaaccccagtaaaggctctggcttagagctcccccttggtcctgcccctgctgcctctgacagatgctggtgcttttctcatgtgtccttccttgtgggccgtgcctcctgtttccaggatctgtgagcatgatgaactttgttttcctgagcttgtcctgtgtctcctcttctggccacacctgactgagcagaacataaaagcgacagaacaccaggagggctgctgcttggggaaattgtgtgagaagagtcctgggggactaggggcagggcaagcactgctctccctctcctggaggctggggagagcatcaaggagactaccaggtaggaggaaccatgggcagggcctccctcatcaggatgctttccccacaacagagggatttaagcccctggtgggtgagtcctggattaaccaagacctgagccttttggggggtgcagaggacagaggacactgtgaggtgagtttctcctgggtggattccccaggggcctctgaggctggtttcaggccctgccctttggctgccccactggaagctctgagcatctacccttcagggacgctttccctggtctgaccttggcaagggcaaataagaggtactccatggagggtcaccaaggtctggggcgtaaacggtgcccatctgcacagtagcatgagggccacagagtgtggtaaatgtcagtgaccatcacatgcggtccccagtgtggctgcaggggccacttaggattcttctgttcggggtcccaggccacacttggggaaccctattggaagcaacaaggtctaggccctgagggcccagggctctgccctctccagggctctagctgagccacgtgcaagcatcctcccggccctcccagctggtgtgaggaggaaaccacagccaaagggcaaggtgctccacacagatatgtccctagtcagcctgccccattcggcctctggagtgggagccttgggtctgtctggaaccagtgtggatgaaatgcagggagaaactggaatcatagccatggacagccactcacatagctgggaagaggcatgctgtggtagatcccggtggactctcacctctgcggtgctggggacgttgtgccgacacctcaggcacccacttccactcacaccgcggaggcttggggagatgcggttcagtctggagtccagcggggggcgacaataaaggcgaccccgctcgtcagtcagaccagggcaagcttgccagggcttcacacttcaccaaagggaaccctttctgccgcgactaccgagctgccagggccgggacaggcagaagcctgccccgaggtctcacctctggagggttacgagctgtgccaggccggctacggtagagggtgtgcaaataccccgcggtcccaaggctcctgaagctgcctaagggatatgagagaccctaggttcgaatcctgcctccatcgtcttatgttcgtgcctcaggagagtcactttgccccgtttcctcgcataccagagagcccagtaacacgctccgcggctctgcggagaaaaagaccctagagatcgtggacacagcgtctgggccgtatcagcgcccactcgagattattactgcttatgcctgcaaccggatgctgtgcgcccggttagaaaaggtcaaataaaactcgagttaggggaagcctgtggacgccatgtgtacaaagtgaagtttaatcaaagttacaaacgttggtgggttttccgggacaaaggcccctcctcgacgcagggttcgcttgggcgacgcgtcgactctcggctccctgcagtcaaggcgcggcgcggcccccgtgccgcttccggtgctcgttgaggttggagcgttggctgaaggcgcggccgcaatctccgcacgcgtagggccgctcgcccgtgtgcgtgcgcaggtggcgcaccaggctgcagttgcgcacgaaggccttgccgcagtcgcggcagatgtagggcttctcgcccgagtgcaggcgctcgtgctggcgcagctcggagcagccgcggaaggtctttccgcactcggagcagccatagggccgctcgccggtgtgcgcgcgctggtgttgcaccaggcccgagcggcccttgaaggccttttcgcacagtgggcacgcgtagggcttggcgctgctgtgagtgcgctggtgccggctcaggttcgagcgctggttgaaggccttgccgcactcggggcacgcgtagggcttctcgccggtgtgcacgcgccggtgctccacgaggtgcgagaacagcccgaaggccttggcgcagtcggcgcactcgtacggcttctccccggctcccgacccccgtcggggactccgctcgctgtagtccccgcagggcgggcaccccagccggaaggcgcgccgcgccaggacggggccacgccggtggcgctcggccgagtgcgtcttctggtggcggtacaggccggagcagcgcacgaaggccttgccgcactcggcgcactcgtagggccgctcgcccgtgtggatgcgctggtgctgcagcaggctggaggtgcgcgtgaaggccttgccgcactcgtcgcaagcgtacagtcgctgggccggggggtcggggacaatagggcgaggtcgcgaggtttggccgcactcaggacacactgggggactcttgcccgcctgctgctgctggttggggcggaagcgcttcccgcaccgggcacacggacggggctcctccgtcgcctgcagcctctcctgggggatccgcagggccctccacgcaaaggcctcgccgcacgcgcaagcccggggctgctccaccaaggggttcctcccgcgggaggtcggctttggggtcctcgggcaggtcggagcgccagtccctggttggcacggccaacagtccgtgtggacctcacacagttgagtccgggggtggttctggatccgctccggacaggggtcacacacgggtggcgtctccccagcgggcgccccgcgatgccacgccaggcaggagttcctgctgcagtccccgccacgcgctgggctcctacaggggccctcccgggcttgcagcccctcggggataaccagctcagggttctgagaagaggtggggccgcacggctcccgcacgaggggtctggtcccggcgctgtgccgggtccccgggccggggctcaccccgaggctgcagccccgggagcccccgcctgggggagtcgtcctaccgcccgccgctccacgcaggtcccccttttgagtggggcggctcccagctcggtcctcttcgaggggcctcggctcctcgggcctcttctcccgggccccggaggcaccctgggcatcggccttggggagtcctccctgcccagccttctgggctggagcctccatcctggggcgcagagttctggttgtaggatctggaagagcagagaagaaatggaggttggcggttcccaggaggagagaagtggagaactgggccaacgagcgaccaccccacagctggcacctactgggcggcccccagctctctgcagatgcgaaagggtaaatggagtgacataggcagcccgtcctgcccctcttcaaattgtcaccacccagaccccagagaacagcttcccaggctctgcctgcccgccatcaccgttcctccccaacactagctcctaaaacactgtgcccctggctaaggccctccctggtcccccttccccaagcaacagggactcccccgttgctcagctgccagctccccaaaatctcacttactcctgccctccgtttctcagtggcaagccgacactccgggtcctcctggctccattcactgccattgtccatgtcttctgagaggtgtgaggtgagactcacctgacagctgagagcctggccgggagatccacgctgcagaggccaatgctggacttcccctcccctcttcaaccaggtaacggtggtgctctcaaggctggcagcctcatctacaaaatgggtatgataacggtaagtataaccagctgagtagggagacaggcagcccagatcattcaagcaagtgtgaacattagcaacgcctggcgcctgctattactattttaaaattacactgtggctgtattagttatctattgttaaagctgctttaacaaactgccaccccatagtggcttgagacagtgcaaacttgttatctcagagttctggaggtcgtaagtcctaagtgaaggtttcagtagtgtgggttccttccagaagctcttggggaggacgtttgctgaccatttccagcttctaggtgccacctacttttctttcttccatcttcaagccagcagtaagacatgttcatctctctctttctgggtttgttgtcaaatctccttatactccttataggattctgacccttctgcctcttgtgatcacactaggccaaccacacataatccaggaatctccccatctcaagatccaaaacttcatcacactcagttcttttgccttgtgaagtaacatagtcagaggttctaggaaacaggacgtgcagatctttcagggggccattattctgcttacaacagtggactttgctgagatacacacacgtgcatatataaatattcatctcctaagcaagcaattgaatagcaagtgaaaacaaaggacggccgggcacggtagctcacgcctgtaatcccagcactttgggaggccgaggcagatggatcacctgaggtcaggagtttgagaccagcctgaccaacatagagaaaccccgtctctactaaaaatacaaaattagccaggcatggtggtgcgtgcctgtaatcccagctactcaggaggctaaagcaagagaatcacttgaacccgggagatggaggttgcagttagccgagatcgcaccattgcactccagcctgggcaacaaaagtgaaactctttcaaaaaaagaaaaggaaaaaaagaaaagagagagagagggagggaggggtgaaggccggggggggggagccgggcgcggtggctcacgcctgtaatcccagcactttgggaggcctaggtgggcagatcacgaggtcaggagatcgataccatcctggctaacacggtgaaaccccgtctctactaaaaatacaaaaaattagctgggcgtggtggcgggcgcctgtagtcccagctactcgggaggctgcggcaggagactggtgtgaacccgggaggcggagcttgcagtgagccgagatcacgccactgcactccagcctgggcgacagaacgagactctgtctcaaaaaaaaaaaaaaaaaaattgccgggcatggtgatgcatgcctgtagtcccagctactcaggaggctaaggcaggagaatcacttgaacctgtgaggtggaggatgcagtaagctgggattgggccactgccctccagcctgggcgacagagcgagactccgtctcaaaaataaataaataaataaatattttcctcattgtgatgtgatgtgaggtttctcagcctcacacgtgataagtgcacaatcctcctgtcccctccctagatctcattgtttccagaacaaagatggatctgtccagcacagcctttagactctgaatcccggatggctaacatcatatgcagagcgtgagatggacacacttgtggcaccctcgtaaatcactgcttcactcggcacaggagctcagattcttctccttttgtcctgtgttccctattctgtgcaaggcagatatcctcttattttattttatttattttggtgttttttgagacagaggctctctctgtcacccaggctgcagtgcagtggcgccatctcagctcactgcaacctccgcctgctgggttcaagcaattctcctgcctcagcctcctgagtagctgggattacaggtgcctgccaccatgtctggctaattttttgtatttttagtagagatggggtttcaccatgctggccaggctggtcttgaactcctgaccttgtgatctgcccacctcggcctcccaaagcgctgggattacaggcgtgagccaccgtacctggccagatatccctttatttatttgtttgtttgtttgtttatttttatttatttagagacagggtttcactcttgttgcccaggctggaatgaagtggcacaatctcagctcaccgcaacctccgcctcctgggttcaagcaattctcctgcctaagcctcctgagtagctgggattataggcattcaccaccaagcccggctaattttgtatttttttcttagtagagccggggtttcaccatgttcacggggctggtcttgaactcctgacttcaggtgatccacccgtctcggcctccccaagtgctgggattataggcgtgagtcaccgcacccagccgatatccatttattaaatgtctcagagggccgggtgtggtggctcatgcctgtaatcccaacacttggggagtccggggggggcggatcacgaggtcaagagatcgagaccatccttgccaacatggtgagacgtccttgacctgatgtcactttttctgtctgttttgcagatttctaacaggcagttgccctgggccacctggtggcctgaaataacttgaccgggaactaaaaggactcacgaagcatttaaccaagactctacatgttgacttttcagccaaggacacttcagagcgactggctgcagttctccaaaggaagctgctgccagttgcccctggggggttatttccttcttggacatcatgaccacaatggcagaaatgcattgatggccagcactctggggatgaatgtttttgagtggaaatgaaacataccaaactggttaaagacaaaaatgcagagttggacaagttctgcaggtcacgaaaggcctttgaagcagccaggcccggttcctgctctgctgtatgggaggctgctggcctgagctggagagcagaaaggcccagtgccaagggttcagcaagtaccagtcccaggccaggcatttgctaataagccagggtgacagtaaggacaaggggactctggtgtgatgtgaggtttctcagcctcacttgtcacacgtgataactgcacaaccctcctgtcccctccaggcctgtgtgagacaggaaaggtgaggctgcctctccctctgcaccttaaagccactcggggtctgggttttcctgagacttcccggagccagatgcagactcccaaaggcgccgatccttcctcgatctccctccctcaagagtggcactaatcaggtctaatttagagaaaatccatcacctccccccactgtgggctctgccacttcatgccttggtctctccacctatcagccagctggagcctgggactcaaggaggcatgcttggaagtaaggaacttctctgagtacgaggacatctgggtggtgctgaacaccagcatgctttgccccgtggcctggactgtgcacagggcacctagagtgacctgtcacctcccacgcaggtggaagggtgtgagagagaatgggcactcagttacaaacatccccttcccaaacacttgtggatctgagtctgaggctactccttccaggtgaggggttggctgctgttgtagcttgttactctctttctgtcccttctgccctcaggtcttgaccatgcagcttcccaagaacaggatggggaatgatatgggcacatggggaggcaagcagccacaggcctcacctgctcatgggcactgaccgtcccaacagcaggtggacatgaatctaacccacagacaccagagtagagggagctgggctccctgagtctggatggggttctcacaggcccccacagggagacaagggaagctttctccagaatgtggagtacggactcactgtgtgaataaagtaaatgagctggagggggcgggacaagatttcaaaaagcaccactcatacacccaggactggcaaagctgctggcagtaagctctatcatggggctcccccactgcaggtgagctgattggcctcagctggcaccatccatgctcagtgtttgccctgaggacaagaagacatggcaaaaaagaggaaagtacagaacacactcccacctggctggtggggatatagatagtgcagctgctgtggaaaccttcagctccacagaaaggtaaagatggagctaccacaccccgagtaattccacccctaggtatccacccaagagaaatgaactcaggcattcaagcaaacactggctcacagatgttcagagcagcgctgttcacagtagccaaaatggagaaacaagccaagtatataaaatgacaaatgcataaataagatgtggtatatccatagaatgggatattattcagccataaaaatggatgagtactaacacatactgcaacatggactttagaaaacatggaaagtaaaagcagtgagtcacaaaagaccacatattgcataattccatttatacgatatatccagaataggcaaatccacagagacagaaagtagactggtggtcgccaggggctgaggggaaagagtggggagtaattgctttacgggtatcaagttttggggtaattaaaatgttctggaaattatagtggtgatggttgcacaacatagtgaatatattaaaacctaaaaaatatactaaaacctggccaggcggtggttcacacttgtaatccccgcactttgggaggcgaaggtgggaagattacttgaggccagttcgagaccagcctggccaaaatgtcgaaaccccatctctgctaaaaatacaaaaattagccgggtgtggtggcacattcctgtagtcccagctacttgggagactgaggcagagaatcactggaacctgggaggtggaggctgcagtgagccgagatcgcaccactgcactccagcctgggcgactgagcaagactccatctcaaaaaaaaaaaattatatatatatatacacacacacaaaaacatggccgggcacagtggctcacgcctgtaatcccaacactttaggaggctgaggcaggtggatcacttgaggtcaggagttcgagaccaccctggccaacatggtgaaaccctgtctatactaaaaatatgaaaattagccaggtgtggtggcaggcgcctgtagtcccagctacttgagaggctgaggcagaattgcttgaacctgggaggaggaggttgcaatgagccgagatcacaacactgtactccagcctgggcaacagagcgagaatctgtctcaaaaaaaaaaaaaagtatatatatatatatatatatatatatatatatatatatataaaattacatatatacttaagagtatatatttatatagaatgtaaatatatattagagatatatatatactaaaacccaacctgaattgtaaaatggttcatttgttacatgatttatatatttttgttttgttttgttttgttttgtttttttgagacggagtctccctctgtcacccaagctggagtgcagtggtgtgatctcagctcactgcaacctctgcctcccgcgttcaagcaagtctcctgcctcagcctcctgagtagctgggattacaggcatgtgccaccaagaacggctaatttttgtatttttagtggagatgggatttcaccatgttggtcaggctggtctcgaactcctgacctcatgatccgcctgcctcggcctcccaaagtgctgggattacaggtgtgagccacctcgcccagctgatttatatctttttttttttttttaaagcagaatgcacccatgccacagtgctccttcctgcagcctgtcaggcgtcggcccaccctgcaacatccaggatgtcatttgagccctggtcacacgaaagcactgcatgggatgaaggtggtttatttatttatttttattttattatttatttatttttttgacacagagtctcgttctgttgcccaggctggagtgcagtgacacaatctcggctcactgcaacctctgcctcccaggttcaagcaattctcctgcctcagcctggcgagtagctgggattacaggtgcctgcccccacgcccagctaatttttgtattttcagtagagatgaggtttcaccctgttggcctggctggtctcaaactcctggcctcaagtgatccccctgcctcagcttcccaaaggtgctgggatcacaggcacaagccactgcgcccggccgaaggtggtttcttttaagcaatacatttgtattgagaaaaacaagttcttggccgggcgcggtggctcacgcctgtaattccagcactttgggaggccgaggcgggcggatcacgaggtcaagagatcgagaccatcctggctaacacggtgaaaccccatctctactaaaaaaaatacaaaaaattagccgggtgtggtggcaggcgcctgtagtcccagctactccggaggctgaggcaggagaatggcttgaacccgggaggcagagcttgccataagtcaaaatcaggccactacactccagcctgggtgacagagcaagactctgtctcaaaaaaaaaaaaaaaaaaaaaaaaaaaaaaaaaaaaagaaagaaaagaaaaaaggaaaaaaaaagagaaaaacaagttcttttaaatctctaggtaaaaataaaataatttctcacacacagccaagtcaactgcataccagagtaccaagcatagtttccacatcagaggcttaagctctggggtaaaagcattttctttaaccaggtgtctgttaattcactcatatcaaagagaaaacttggctgggtgtagtggcttatgcctataatcccagcactttgtgaagccaaggtgggtggatggcttgagcccaggagttagagaccagcctgggcagtatggtgaaaccctgtctctattaaaaaaaaaaaaaaaaatggccggacgtggtgactcatgcctgtaatcccaacactttgggaggccaaggtgggtggatcacgaggtcaggagattgagaccagcctggctaacatggtgaaaccccatctctactaaaaatacaaaaaattagccaggcgaggtggcgcgcacctgtaatcccagatactcgggaggctgagacaggagaatcactggaatccgggaggcggaggttgcagtgagccaagatcgtgccactgcactccagcctgggcgacagagcgagactccgtcaaaaaaaaaaaaaaaaggctgggcgcagtggctcacaccagtaatcccagcactttgggaggtgggcagatcacgaggtcaggagattgagaccatcctggctaacatggtgaaatcccgtctctactaaaaaatagaaaaaattagccaggtgtggtggtgggcgcctgcaggagaatggtgtgaacccgggaggcggagcttgtagtgagccgagatcttgccactgcactccagcctgggtgacagaacgagactccatctcaaaaaaaaaactatccaggtgtggtggtgcaagcctgtagccccagctgtcaggaagctaaggtgggatgatcgcttgagcctgggagattgaggctgcagtgagctacaattgcaccactgcacgccagcctgggcaacacagtgagaccacatctcaaaaaaagaaagcaaagaaaactcttcattagaaactgaacatgctcgctgggaatgatattcagggcacagggcaattccttacaggggcacacacccaagggcactgctgccaccacatgggaagttgtgacgggagggaggagactgagggcaggacacaagacatggagacacacattctggtctgtctgaccatggagctctgtccacacccaggctgcctgctggctcccaaccaccacacacagtatctggcgtttctcacaggtgtcggcttctctctctcgagtccatctgctggccgtggacctggctattcggggcaggcccatcctgcccacctccccacactctctcaagcctctgtctctgagcactgcaggttttgtagtgttccctcgtctacctctgagaggccaggctgactgaagagctcctgagaaagccaccaggacccactgctaaaggggttggtccagggtcattgccaggctgggatctgaggtccccacacatagggcagggaactccccagccatagactctgatgggggtaccagtgtggactccagccctttacacggaggagggagcatgccactatggatgctgagcagcaggaggtcaggggccccgctttcacaatgtgccatcccagaagccccacagccaggatctggacctctctgacacaactccaggtcacagagacccagatgtcagggatggagggacttgggcacctgccttgctattagctccaaggctgctggcttcatgtcacagtctgtacaacagctggtggcatgagcagggctaggaccagcactcagcatgacttcctagaactctagggacttaggggctgaggacttcccagggtgaaagaccatacctgggacagcctggccaaacagggacaattgatcaccatggaatcagtggacaggcccaagaatggatgggcacatgaggtcacccaggatcaggcaggttccactgaaggaggctgcaaaagatatatccaatgtcctaaccccggaactctcagaatgtgaccttattaggtctttgcagacataattaaggatcttgtgatgagatcaccctgaataacctgggtgtgccctaattccaatgacaggtgtccttatgaaggaggcaaagggagttctgacacggagaagagtggtccatgtgaagatggaggctgatattggagtgatgcagccacactccaaggaacacccggagccgccagaagccggaagaggcaaggaaagacccccacccagagccgtcagagagcacagtactgctgacaccttgatttcagacttctggcttccaggactgtgagagtaaatttctgttgttttaaactgcccagtttgtggtagtgtgttatagcagccacagaaactaatagagactggtctagcaccctcgacagaatgtgtgtgttgtaaggggctctcctgatccctagtgatggggagtcagaggactgcttagtgtctgaacagagggttggggaagctgggttgtcctgaagaaccagcagtccccacttggcagaaagggaccctgaacttgtgggaggtgggggctgaggggcacctgctagccatgtgctaacagcatcttcggattggtccccagatgccctgctcccaggggtggctcctctgctgcaacaagaacctgcctcccagcaccagacacagcaggtgggagctgtggaccatggccgagtctcttcgtctccttgatctgctcccaggatgcactgtccaactatcccacctgtaggtgggtggcattccagccatggacccatgatctgaggctgagcacagcaaacacaatcgaggctctgggtcccaggtcccaggagcccgtccttgatggtgcattacagctctcccaggctgttcttacagtgacctcccacctgccccaggtgagcatgcttgcacctgggtgctcgcccagcctttctagttgtccttagggcttctggtgttgggaacaggatgcagagttaccaatttagggggactgagaggttaacgtggccaaggctgagccctgcagaactgcagagcaacagcacacacaggaaagctagtgaggttcaacatcctcatggaggttgcacacggcacaatgaggtcttatttgcccaagagaatgtgcagggaagtcgccaggcacggtggtgcatgcctgtaatcccagctactcgggaggctgaggctggagaatcgcttgaacccgggaggcggaggttgcagtgagccgagatcgcgccactgcactccagcctgggcaacaagagcgaaactccgtctcaaaacaacaacaacaacaacaacaacaaaaacagaatgtgcagggaagtcaacgttggtggctctgaggtgtggaggacacaggctagtgcccagctcagcgtggctccacctctctgagccacagaccaacctcacccacactgacagtcccaggggacacagactctagcccctatgtccaattctacactgtgcacgcaatgggaagaacagtgcatcatgcactgtacagcagaagaaatgtcctctgagtgcaggcacagctcccttctgtgtctgtcctcccgacagtgcctccaccctcaaggattagcaagcttcaaccctcgcaggacatccactgtgtcagggccaaacggtgctgcatcctgctctaatagtgagtgaaggaggggaccgcagacaagaagaaatgaacaagagaccgtttaagagagaaaaagacgtgaagaacatcagacagggagcagcgcgagggcgccagggagggaggcagcggattcttcgggcctctgtgaagagggggcatgaaaccggtctgcagacaaggaaagagcaaagtgcaaaggccaggatgcgggggcagagacggtagggaggccggcgtcggcctcggctagcaggtgggcttgactccgagagccgcaggccgccaggatgggtcccgggcctggagcctcccctcgcgggcttcaatgacacccagcacggaaacgcgggggccagaactacagaagcccgtcccgcccggaactcaaggtcgcgagtgctgtgtggccggtccggacccggagcgcgaggaccggaagtgcgcggcgtcacgcctctgccccggaccccgcgcgcggaggtggagaggggactggggtggtggccgcgctatgcgccgggaggtccccgcctcgcaggccgaggttgcgggtccgcgcagaatgccacttactctctggaggcggcccgcacgggtccctggtccccgccccgcatgcagcgcggagccgtcctcccgccacctccgggccgccgcggcactgagggacccgggccacagcaagcgcaggcgggaacccgcgcggggactgctgggaaacgtagtcccgtcatgtcccgctttgacgctgcggagaaagcggtgtagggagaggcttgggcttcggttatcatagaaacagaggccggctacacctaaaaggcggggcgtggacctaagtcgtcgccaaagaaacggcgttctggacggggacgtagggtcccgcccattccttctcgtgaaagcgggtgactggtcatgattatgattgatagcctcctctcccaatctgatttctaagaggtcccaacccggaaccgacttgcggttcgcaggctcccctcgggtgggagagttgggctgggaagcacctggggagctctgaagtgtcttggtgagcgcgttgcgagtcagaccgataacatcagaatctgggactgggcccgagcatatgcgcgtcaaaactcctcagttaagtctatttttttgtattttttttggtttgcttttttgagacggggtctcgctctgtcgcccaggctaatgcagtgacaccatcacggttcactgcagcctcgacctcctgagctcaagcgatcctcctacttcagcctccagagtagctgttaacaggggcgcgcgccaccacgcccggctaattttctttcttctctccctccccctccttctccccctcccttcctcctcccactatgtcgcccaggctggtctcgaactcctgtactgaagcgaccctcccacctcaccctcccgaatagctgggactataggtgggagccaccatgcctggatagtttttttatttttatttatttatttattttagagatagggtctccatatgttgcccagactggtctggaactcctgggctcaagcgatcctcgtgtctcagccttccagagtgctgggagtacaggcttgagccactgcgccaggcccctagtccggctcctagttgattctaacacgtgcggccccattggggaaccacagcctccccagcccctttgggtgttgctgactctacgggccctcccaggtaggatgaactggtcacgcctcctacccatttgtaacccccagctcttgcccccatctattgtgtggctcctgccctcaatagggacatctaattttgttggccagtccagcacatatattgcatgtaacgacccagtttgccccacctttctgcctccactgcatctgcttcagggatgctgggactgttccactccctttctccatcctttgggtgtctgcacatcgaaagccttgtcaggaggtctatctccctgcccaagtacaaaactcagggcttaccaagctaattgagggcgagcaggaggctgaagggcacttggagggctgcccgccttgtgggtcccttggtggctgaagagagttgcacaggaaggccttgacaattgtcacagagaaaggagtgcagctgctggctctgtgtgggtgtgcagatgtctgacaggttcagccactggccccaattgggacacaagtgggatttctttttttttttcttttttgagacagtcttgctctgttgcccaggctggagtgcagtggccgcgatctcagctcactgcaacttccgcctcccaggttcaagcagttctctgcctcagcctcccgagtagctgggattataggtgcccacgacctcgcccggctaatttttgtatttttagtagagatggggtttcaccatcttggccaggctggtcttgaattcctgacctcatgatccacccgcctcggcctcacaaagtgctgggattcaggcatgagccactgcacccggcctgacacaagtaggatttctcacacctgtggatgcactgctactggaggagtcttgagcctatgtggaagaacttcccactcccaggcacagaaagggcctccctctggagtgaagattctggtggtaccacaggcctggccaccacacaaaggccttgtccctgcagggctggcatggggtgactggcagccctggagtggagtttgaagcaccaatgaaaggcctaaccacttggcaggcacaggtgcgggggacttgtctggaggggaccggctatgggggctgtgacagtctgtaggctttcttcacttctacacaagcctgttgtctaagtggaccctgcagggttcatgcaggggcagcaccagagaagcatcttgtgacaatggttacacaggagcgatttcaggaatgagactgaatcaggcaaggacctggagaggaagctccagtggggctcccacccaaggggtccaactttaccaatcccacaggtccccagtctggggctcattctatgtctgtaggcctgggaccctgcacccaggagagttgtcctgctaccggccatccctccgcagaggtccccctctggctctatgctgtcttcagcaaagggcctctgctccatttcacacctctcctgagggcctggggtagcttactgcgaagcagcctcagggaatagaggcttcagcagggcatcttggcccccaacacagaatcctggttgtaggatctggaagaacagaggagaaatggaagttggcagttcccaggaggggagaaggtgctggtgagccacgaaagcaaaccccagtggctgaagcatcctggatgactcggccacatttccttaagaatctttgtgtgtgtgtgtgtgtgagacggagtcccattctgtcacccaggctggagtgaagtggtgcgatcttggctcactgcaacctccaccgcccaggttcaagtgattctcttgcttcagcctcccgagtagctgagactacaagcgcccgccaccacgcctggctaatttttttgtatttttagtagagatggggtttcactgtgttagccaagatggtctcgatctcctgacctcgtgatgtgcccgcctcggcctcccaaagtgctgggattacaggcatgagccaccatgcccggccctcttctgtctcttataaggacacttgtcattggatttagggtccaccctactaatcctagatgctctcatcttgggatccttgactaaattacatctgcaaagatttttttccaataggtcacattcgctgggtctgggtattagggcatgaacttacctttttgggggccaccattcaatccattacaggtgggcatcccatagaagcagacagtggctaggccaaagtagcccatgaagtatcagccatgggcacaagatcaagtttgggatgcggcagggccaggcttggctctgccaggcaactgggtggactgaatccagcacactccaaacgagttgataatcaggctggggacttcaacagacaaccaaggtgccagtaaaggcattaaggagctatcacggccaggtgcggtggctcacacctgtaatcccagcactttgggaggccgaggcaggcggatcacgaggttaggagatcgagaccatcctggctaacagtgaaaccccatctctactaaaaatacaaaaaaaatagccgggcgtggtggcgggcgcctgtagtcccagctactcgggaggctgaggcaggagaatggcatgaacccaggaggcggagcttgcagtgagccaagattgcgccactgcactccagcctgggcaacagagtgagactccgtcacaaaaaaaaaaaaggagccatcacaaggatgtaagatcagctaacagtaagactgtggctggtagggtggacaggcaaagtgactgcctggagagtgggcaggtggcccagcagggcccagagggtgccttcccagaagtgaggagtccagtctggggccggccactcaggatggacacaatgtaccagaagtgaggtagatctctgcagagtctctggggtcctcatccagtctgaagaacacagcaccagcagccctagatctatgaggtcagactctgcatcttatcgtagcaccttggggacctggggaggctggaccaccctggacctggtggcgggggtggggggtgcatgagtctcggctctgcagtattcaccacgccacacttgagggcacctgccctctgcagcacgatgagtcattctcatgaggtctgtaaagatgtccattatcaaatgaccatggtagccaggccacagggttcacattgacgttgcctcattgcattctcatttccacactgaaggggaaaacaggttcagaggggtgggctcactgtcctgatgagtgctgcctgttttctcccaccctccctacaaccagcacccccatgcccctcactcaagaccagggagaagcccacctagcccctcctgcaaccacacagaccccagtgggagccccaaggctgctactctgcacaggatggagggcaggggtaaaggccattaggcggtggcagtaggccgtgcccctcaccagaggctgaggtctgaccccttgaccagcccagcttcagggcatgtgtcctttcatgagctgtgactgaccacagtccaagggcccactgtggggagtcctcagcatatttggacagaaacgccccagaattggggtaagaagagcctttacagtcaggcagtgaagaaacacagctgctgggcacctgctatgtgcacgcctcagggatgggagtagggggcaggcccagccctgggacctgggtcaggtggctgggcccttcggatcccgagttggagggataaccccttggaggcagagatgggcatcagagacagggcggccccaggtggtcctggagtcgcctcgtaaaggttatgtctatgcctgctgcaggcagagacacagtcaaagtagttgctacctctggaaagtcccagttctgctcatgagcctagatctaagaggctgggacaggcagaggggtatgaaggggtcatgggcaggcagactgtccacactggctgccagggtggccaagtgagtagagtgagctggggcactcactaccgtgccaaccccacgcacggatgaggaccccgggtcgaaggcccacatcctcaatcccacgcaatagttcaggccctgtgagagggttcgctgtctgctcccagccagggctgagctgttcagaggccctacctgttcagaggcagctgggggaagggacagaagttggggggcaggggattgtgtgctggcgggaataatctccttcatctcatggctaaatcttccatccctcctttcaacctttggccagaaacctacgtttctgacccttggagaggtcggccagttcaagaggcacccctgagagccacgtctgcagacacgagggcctcgtgacgtgagccctgagggcagggggctgcaacccctcgcgcgggctccccggccgtggaggacacaaggacaaacacgaagggtccccgacctgccgaccccctcctcccggacaccgcgcgtagcctgtaggctacctccgcgctccacccagagacgggtcgcgctgctcccgccgccgcaaccccgggccctcgtgccggcggtctcccctcttccacgggcgagattactgcatagcagaggtgaagggcgcggaggctgtgggggaacccagcgtggtatggcaggaaaggtcgagcagggaaacaggcccagccagaggctcgggatccggggctcgcgagcgtggtgctcctgggccgggcggtgggggaggggccgcgtgtggcaggcacatgcgcacggcaacctggacctgcggagggcggcggtgaccactgggcctcactccgctaacccaggtccgcatcaggcgcgtgccggtgaggcggctgtggccgcggcgaggagtcagagggaactgaactggctactcccgcggcaggtgggatttaaggtcagcagctgaacaaagaagcgagcgctggccagacttttttctttattagacatggctgcgttggtctcacggaaatctctgcgcttttgcaggcgcccacaagacagggcaactacggggtagcggacatccgccaggcacgcttctagggccgcttctgcaactgcgcatgcgcttgggctgcacccattccgtctagcccaaaaggttcctctacaaccttcctccggattggtctatagggacacgatggccttttacgcaagcgtcacccgtgctgacccggaagttttcttcccagttaaaagtgttggcccgcggcgcgcggcctcttcctgtctgtaccagggcggcgcgtggtctacgccgagtgacagagacgctcaggctgtgttctcaggtgagaccgccgcggggccggggatcctagggacggttcatggtctttcggggatagtgccccgcggcctgggccttttctcattaggtctcatttctgtctctggaaaagaaaatgtagaagaaacgggcgcgggccgagttactcttgacttctttctggtgctccgccgcttctagcttttccccatagcggggcttggggaacttggtttgaactatgcggttgtactctgagataggaagtttccatttcttagggacacgatgccctcttttgctctgtgtaactttccccccgtaatagcagcccctagagccttcatactgtcggtcaagaatcgaaacctttgggttgattgtgccacacggtacctaccgtggtccttgatgtcatataacggtcccgcctcacggccaaagaaacagtccgagacggaacgttgacttgggtcaaagaccatgtaaatcgcgagattgtggtttgaattacagcccatgcagtgtgaggacgtatggcatctgctgagccattataccttggtcccagtgcagcagctgttgactggtggctgccaagtcttgggcccaggggttctaggtgaaagacagatgcttcttgctgacagctgagtaatttttctagtgcttgaaaacacgttcacggcctttcttggtcctttgcgaccccccagttcatcactagatggcggctagcctcagagttgggaatgagtgcgcctttgctccatgctagctgagctctgacgtttttttcctgtcatcaccctgtcccaggatgaccgagtgggagacagcagcaccagcggtggcagagaccccagacatcaagctctttgggaagtggagcaccgatgatgtgcagatcaatgacatttccctgcaggtgaggggaacttggtgattggccttcctggctgggggcggacattattccaggaaggcacacatcaaacttgttgctgtgccattaagtcaagaatagagatcataacaggtaaagaagggatcccttgaccaccacatctaccacatctgctcttacgtcctgttcaaagatgactacaacttctgtcatgagaggactccttcaccagaaggagcatcacatctcacatatggtatttttgttactgtttttgtagtaaaatacataacatccagtgtcattcttttgcatgtgaatatccagttatccagtaccatctcctaaagagatgttttttttccctcaattgaatggccttggccacttgtcataaatcagctggccgtagttttttttttttttttttttttttgagacggagtctcactctgttccctgggctggagtgcagtgacgcgatctgcctaccgggttcacaccattctcctgcctcagcctcctgagtagctgggactacaggtgcccgccactgcacctggctgatttttttttttttatttttagtagagacagggtttcaccgagttagccaggatggtctcgatctcctgacctcgtgatccgcccgtctcggcctcccaaagtgctgggattacaggcgtgagccaccgcgcccggcccagatgtatgggtttcattacagactttcagttatattccactggtctatatgtctgtctctatgccagtaccacactttcttgctttgtattaagttttgcaattgggaagtgtgagttgtcctactttgttcctactccgtacggttttacacataccctttttttcccctccccatgaaggcatcattaagaattttgtgggccttaagaactttagcttttgtgagcccttcctccattaaaagaaagtgtttgaaattatattttgtgactgcattgatataaagatgaatataacttgggttgcactttattcactttcctcctctttttttttaatcattaaagttttatctttgagataagatcactctctgtcacccaggctggagtgcagtggtgtgatcacagttcactgcagcctcaatacacctgggctcaggggatcttcctgtcttagactccaactagctgggaccaaagatgcatgccaccaaacctgctaccttttgttttataaagaatgaaaacttttttgttgtctgtaaagatgtcaggggacttaggcactatgcctaatggataattcagccttgtttttcactctgaatatcttgtagatcttggcttttctttccttcaggggtttatttcggggggtccaaaaacattttaaatattattattattttttgtttgtttatttatttatttatttttttgaaacggagtttcgctcttattgcccaggctggagtgcaatggcacgatcttagctcaccacaacctccgcctcccgggttcaagcaatgctcccgcctcagcctcccaagtagctgagattacaggcgcacaccaccacgcctggctaatttttgtatttttagtagagacggggtttcaccatgttggttaggctggtctcgaactcctgacctcatgatctgcccggccacattttaattatttatttattttttgagacagagtttcgttcttgtcgcccagtctggagtgcaatggtgcgatcttggctcactgcaacctctgcctcctgggttcaagcgattctcctgtctcagcctcccaagtagcggggattacaggcacatgccaccgcacccagctaatttttttatttttagttgagacagggtttcatcatattggtcaggctggtctcttaactcctgacttcaggtgatcagcctgcctcagcctcccaaagtgctgggattacaggcatgagccaccacgcctggcgttatttatttatttgtgagacagagtctctctctgcctcccaggctggagtgcagtggtgcgatctcggctcactgcaacctctgcctccccagggtcatgcgactttcctgcctcagcctcccgaagtgctggggttataggcatgagccactgcgcccagcccacaaacattttcattataggcccagataatgttttagactttgtgggccacactggccactgttactttttttttttttttttttttttttttttgagatggagtcgctctgtcacccaggctggagtgcagtggcacgatctcggctcactgcaacctccacctcctaggttcaggtgattttcctgcctcagcctccctagtagctggaactacaggtgcatgccaccacacctggctaatttttgtctttttagtagagacagggtttcaccatgttggccaggctggccttgaactccttgatctattaaacgtttgttaagtgcctgttccactagggaaataaacatcaatgggagttcactgtattttaaacacctgtgcagggctccactgttgggccaaacccttcctggggaatttggtgtttgcaattttttgctgcatagtgaaagccctgcgtgaatgcccttcacgagactgtgagttttttttttcttgcagccagactatgaaatagtactgagagtttcagtgtcctgtgttcttttcccatcattccttgtatttgtagaaacaggtattttgtgtatattctcagaggcaagtgatagaatggccttgggtacattttgtaatggaactatcaacagcagtctccttcgaatgcacatagctcctttcttcccctttacatactcaaggttaactttttggcatttttctagatttttgtgtggggatggctatgtaagtataagaagacttgttaaatgattgttttaaaactgtggttctgggccgggcgccgtaatcccagcactttgggagactgaggcgggcagatcatctgaggtcaggggtttgagaccagcctggccaacatggtgaagccccgtctctactaaaaatacaaaaattagccttgcatggtggcgtgcacctgttgtcccagctacttaggaggctgatgcaggagaatcgcttgaacctgggaggtggaggttgggatgagctgaaatcatgccattgcactccagcctggccaacaagagcgaaactccatctcaaaaaaaaaaaaaaaaaaaactgggctgagcatggtgacgcatgtctgtaatcccagcaacttgggaggctgaggcaggagaattgcttcaacccaggaggtggaggttgcagtgagccaagattgcaacgttgcactccagcctgggtgacagagtgagactccatctcaaaaacaaacaaacaaaaaacccaaaaacaaaaaagttctcagccaggtgcagtggcttatgcctgtaatcccatcactttgggaggctgaggcggacggatcacctgaggtcaagagttcaagaccagcctggccaacatgtccaaaccccagctctactaaaaatacaaaaattagcctggcatggtggcatgcacctgtagtcccagctactcaggaagctgaggcaggagaattgcttgaacctgggaggcggaggtttcagtgagccaagattgcaccactgccctccagcctggaaggcagtgagactccatctcaaaaaacaaaaaaccaaaaaactgtggttcctactctggggtggttggtttcctgtcttagagaacacttagcaatgcctggatacatttttagatgtgaaaactgaccggggtggtgccaggcactgtggctcatgcctgtaatttcagcactttgggagcacaaggcaggcagatcacttgaggtcaagagttcgagaccagcctgctcaaaacagtgaaaccccttttctattaaaagtacaaaaaatttagctgggcttggtggcgcgtgcctgtaattccagctactcaggaggctgaggcaggagaatcacttgaacccaggaggcagaagttgcagtgagccgaggttgcgccactgcactccagcctgggtgacagcaagactcagcctcaagggggggaaaaaaaaaactaggccaggcgcagtggctcatgcctgtaatcccaacactttgggaggccaagacaggcggatcacaaggccaggagttcaagaccagcctggccaacatagtgaaacctgtctctactaaaaatacaaaaaaactagctaggcttggtggcaggcccctataatcctagctactcgggaggttgaggcaggagaaccatttgaacctcggagtcgtaggttgcagtgagctaagatggcaccactgcacaccagcctgggtgacagtgagagactcaaaaaaaaaaaaactgaaggggttgccagtggcataccagatggctgttaaacatcctatagtgtgcaggacagccccccagacaattatctggtccaaaatctagtctccttagattcccactcttccattacgaaggaagtgtactttttagcgacttggtaaagtcacctgttcagggtttttttcctcatggtggatggggcttacatccaagtcccctgttgaggcataccaggatcccagacagctgttggactaccccgaatgggtacttgatctctcctctggtgtctggccaacgcccatgctgctcctgaccattttcccttcatttcctgctccctgctgccccaggattacattgcagtgaaggagaagtatgccaagtacctgcctcacagtgcagggcggtatgccgccaaacgcttccgcaaagctcagtgtcccattgtggagcgcctcactaactccatgatgatgcacggccgcaacaacggcaagaagctcatgactgtgcgcatcgtcaagcatgccttcgagatcatacacctgctcacaggcgaggtagggctctgtggcctggtgagggcaggctgtgccctcagtacacccgaaagccccacggagtgtatgtcaggcttatcccctgtgtggtgtggtcactcttgttttaggtatgaggaaaggggaggaatgcatggggctggatgtcaggctcatatcccccttctctctagaaccctctgcaggtcctggtgaacgccatcatcaacagtggtccccgggaggactccacacgcattgggcgcgccgggactgtgagacgacaggctgtggatgtgtcccccctgcgccgtgtgaaccaggtgagcctggggcttatgcacgtggcagggtggacacagccacgggagtgggtggggtcttgcctggggcaggaaggctcctctctgtctgcatgttttacctgcagcatcacttcctctaggaagccttcctggattcccaccctgcataggggctgatccaggctctgggtcctcttcgggaacacatttggcagaggtcttctttctttcctttgggtgtatatttttacactgtgtgtatatgtactttttttttttttcttggacattttgagaatcagttgcagacattttgattgtgttttccctgaacactgcaggtgtctttaaaaacaaagatgacctacccccgtcgtcacccccaggaaggaatttatattcacagcaatagtcgttgttccatttagcatctgtccccagaatgccagaatgccctttatagtggcgcattgtcaattgggtccaagttaaaagcaaatatattgccttgttttttagaaataattgagatggaatctcagggtgttcttgaattcctggtctcaaatgatcctgtcccctcagcctcccaaagtgctaggattacaggcatgagccaccacacctggccgccttttttgttgtcgtcggtttttttgtttgtagaggtggggtttcaccaagttgctcaggctggtctcaaactccctgccaaagtgttcctcctgcctcagcatcccgaagtgttacaggcgcaagccaccgtgcccggccgtctagcagtttgctgttgaggcaggtctcaatctcctgtcactggggacgcaacttcagcctgtgtgtgtgtgtgtctggacacttgctcttgtgaccctctatctgattgcaaatcaggcatgatgccaccacctcttgtctcagtgggcctatgggtgacaacgtggctggcagcatcagttgggagtggccccagggtgctggaggaccgcagtctgtccttctagcctgacccctgctgtcttcctaggccatctggctgctgtgcacaggcgctcgtgaggctgccttccggaacattaagaccattgctgagtgcctggcagatgagctcatcaatgctgccaaggtgggtgagggcactccggttggggggtcttaagttgggcatttgtgggggtccttcagaattcagagctgtgtgtctccttgcagggctcctcgaactcctatgccattaagaagaaggacgagctggagcgtgtggccaagtccaaccgctgattttcccagctgctgcccaataaacctgtctgccctttggggcagtcccagccacctgtgctgttgtctgtcttcggtggggggatgtgggtggcatagccctggtggccttgggagctgctcaccttcctgacctgttggcctgtggggacctggaagtattgctgactcagaaccatggcaccccagggctagcaggtggggcactggatgcaggccaggctgcctggagtgtcccagcaggtactggaaatgagatggggttatccataacttctgagggcgtggcacatgagatgttgctgtggtctgggtggatgggtggcttgggtgcctgtgaggtctgggtagtcacaagaccatcctgagaggcttgtcaccttgaagtagcactggggagaggaggaaagctcagctgtttagggcacacgatttcagacccctagcttcacccccctcttggagtgtggggtggtttcacactggcgaggttgtgctcctggttacctccccggctacactggttgtggctgcaccctgggcctgcacacccagtttctgtgggctgtacgggttcccttctgccagtgtccatgcagtgtcatcaggctgctggggacaggttgggacccacccagggccacaggctggtgactctggtagaagactcatcaggttctgaagggtggggtgggcccaagcccacccaccgtgtgccatcacccttccaccgcccccaacatctggccaagacaggcttggtgttcatcctggtggggctggcccagggggcggggcaggcagtcaaacgggtccagcgggtacctgggacctggaggggtggtgccggttgagcaccctccccctgggagggtacttttgagcccagctgctggcaggccaggaacagacagggacacgccactggccagagggaggaggcttccacaggtaggaaggcgcccacaggctggctgcggtctgtcattactctgtggggggtgcctatctctgctcctctgtgggtcaggtcctttccatccctgtctggggtcctccccatctccgtgttcaactgcggtctgtctctccgtttccaattcaggaactggtaccccgtgggtccattcctatccccagtctccgcctcgggcctccccatctcccctgctcctcgacgctagctacacccttctcgggatggggtgctctgtactgggggatcctctctaaagtacagtccccagtcttccctggattccctgctggtctcagaacccgctccaggctccaccgcctccttccctgcctgacctcctctcctcccaggtccatccggatgccctgccctcggccgttctggctccgccattcccgggccccccagggctcgggtcccagctccccaggctcgctctctgcgccccgctccccaagcagaggggaagaccaggaggaggaggaggaggaggaaggggacggcagcccaggctccggccctatcctgccccccgcctccccggtggagtgcctcatctgcgtgtcgtccttcgacggcgtgttcaagctgcccaagcgcctggactgcggccacgtcttctgtctcgagtgcctggcgcgcctatcgttggccacggcgggcggcggcaacgcggtggcctgtccggtgtgccgcgcgcccacgcgcctggccccccgccgcggactccccgcgttgcccacgcagtccggtctcctgccccgcgacgcgcgcgcaccgccctctcgccagggctccgtgcgcttcgaccggcgccgcggccttctctacctgcggccgccgccgcccccgcccgggccgcgcaaggcccgcgccccgccgcccccgccgcctctgcgcctgggccgcccgctgtcgcgccgcttgtcgctggccagcccggcctgggtcttcaacgctgccgtggcgctggcggtgctggtggccgcgggcctcgtggtctcgggcgtctacatcttcttcctcatcccgcacgccacctcctccggccccccgcggccccagctcgtggcgctcgctccagcgcctggcttctcttggtttccgccgaggcccccgccggggtcgccctgggcccccgcctggacgccgcgccccacgggccctgacctggacacggccctgccaggaactgcagaagatgcgctggagcccgaggcgggccccgaggacccggcggaggccgagaggacgctggacaggcgatcggatggcacgtggggcacagaggctggccccggctgggccccgtggccacggggcgcgaggaggctgtggggctcacaataagtgcgccagtactgcagtcctgcctccaggcctggcacctccgtgttatctggggcccttagtagggcgcgcagcacttacctgtttctccagattggggcttagggcaagcatccttggcattgtcaccatggggctggaccctctcaaggagcaggcaccgcagtcgtcccacaaggatcctctgggaacacccctgacccccattcttgtggctgtccagcggagggtgccctgaccgtgacctctataagggtcctgctggggcttgctcctgctccgcaacccctactccgtgggggtgcagttggaagcatccctgatcctcatcccttgtaggagtccagctgtggacgcccccgactgacatccatgcaggtgcccagccaggggcagccccacacggatccttgaacgggtcttgctgggagtgcccccagtcatcctcaccacagattcctgggggagcgtccttgccagcactggaggccaaagcactcatccttcggattggccataggttgcaggggcccgcctatctttggagggcagagctgctgctgctattcttccttggtcacctcctccccaactggctcattgcaggggacgtcccaccactccacccatctgtggagtttgttttctactgcctgcaggctgggcctgggtgggctccagctgtctacatgctggtcccgggtgtagagttgccatcctgtacacctggttggggctggggctcaggcttgaagtaacagggtgtcctggccagggctggggaggaacttgagccttaaagactggctcccgccccaatcctaagtcccaaactgctctgggagcctccacttccccctgggtcgtggcttctaggatcctcccaatatgctgtggtgcagctgtgcttatcatggctcagaggccaacatcaccccaggggtcagacagaggcagacaatggtgggggtgggagtcctggacctccttggttagccagagggatcctagtccctttccctggccaccagagtccccatcacccccgattaatatcttgatgccagttactgcacttcttcctccagggctccatctgtcctgcccagcctcctttcttgtacctcgaggtgaaccctgagccttcccaatagacagcagcctccagggaaggtggcatatgggctcctgtcctcttcctcccagaagtcttcctgggttagttatgggggtagatggcagctattctctgtgcagactgaacctggggcttctgtttcctcccaggccctgcacaccacccccccaatcctgcctcacctcactctgggatggagtgctgtgttttgggaatgggcacccagcatgttccaaagcgaaacgtgacttctatgtggctggaggctcctgtttgatttgttaacgtgtgtcctcagcaccagcatacagtaggtgccaaacaagggagtgacagaattgcaggtgacccaggcagcctgggaatgcaccctgggcccaggactgtctagagctagctctggtgtgagctgctgcttccaggtgggagccagaggaggaacactagggagtccacagtgtgtcttcccagaccagttcttgcccacacccacatgccgatgtcacccacaggggctgggaccagtgtactgggtcactgggcagccacagcccagcctcatagggaagaaacctggtcagacagccgcagagttggtggtctattcattttctgtggctgctgtgacaaaatacccccaacttaattatttagaacacgcgtttattttttttaatttatttttgaaacagagtctcactctgtcgcccgagctggagtggagtggtatgatctcggcttactgcaacctccgcttcccgggttcaagcgattctcctgccttaggctcccaagtagctgggattacaggcgcccgccaccatgcctggctaatttttgtatttttagtagagacggggtttcaccatgttggccaggctgatctcaaactcccggcctcgtgatttgcctgccttgccctcccaaagtgctgggattacaggcctgagccaccgcagccggccttatttcatttatttatttatttttttgagacagagtctcgctctgtagcccaggctagagtgcagtggcgcaacctcggttcactgcaacctctgcctcctaggttcaaatcattctcctgcctcagtctcccaagtagctgatattacaggcgcccgccaccacacccggctttttgtatttgtaatagagacggggtttcaccatgttggccaggctggtcttgaactcttggtctcaagtaatctacccacctcagcctcccaaagtgctgggattacaggcatgggccaccatgcctggctaaacacacacttcttatcttgcagttctgcagtccagaagtcaacgatcagtttcactgggctaaagttgagttgcccatagggctagttctttctagaggctctaagagagaattcatttcattagtttttccagcttctagggctgcattccttggctcctggctccttcaaagccagcagtgcagcatcttcagatctctctgaccctcctacctccctctttcacttataaggacactacaagtacatagcgcccacccgaataatccaagatagtctccccatctcatgatcattaatttaatcacacctgcaaagtccattttgtggtgtcaggtaaaagattcacaagttccagggattcagaccgggatatctttggaggccattattctgcctaccatagggtctcagagatcctcctcattgcttccctctcccacccaacctaggggagtgggggtgtgcaatggtatttctgacccagacaggccaagcaggggagtcagaaaggggcccttgcctggtgttgcacagaagagggagaggatgttctgtgcctgagggtagaccaggaaggctgcctggaggagggagctgtatcctaaaggatgctcaggagctggcattgaggccagtggcatagcctgcacaaatacaggaggacctggggaggccaggggtggggctgggggtattgggtggggctggccgcattctccgtcttaaccagctcgctcctaggtgcttttgtggcttctgcactctaccagcttggagccaggggcctcattctctcttgcagtaaaatgaggctgatgactgagcctaggagttgctgggcatctggtctgctgattaccaccttggtgcccaatgtctgcctgcctatccactgctttcaaacaaagaggctgcctgacaccacccagggggacgcctcccacccttgcccagcctcagccaatctcctctttctcttcttcagagctggagttgtgccctcctatcctctctctgcccaccccatcactgctgtacaccctgccccttggcacttcggccccggacttgctcctcctggcaggcctgggtgcttgtgaagccgggtgccagagggcccagcacggcacggcctttgattctgttttctgtaaatcgacgacaataaattctctttttccttcatccacaagtgtttactgagcgccttctgtgtaccaggccgcaccagggtgcggagcaaagaccaacctcagggagcagatgaggtccaggcggctgaaccaaccgaaccatggttctggtagcactgcctcccccgccaccctcagggggccctgctccccaagcccttcccaaatcctgccgtccagctctcctccccaccttgcaggagggacgccagggcccggttttcgggttccgccattctttcctcaatgagggtcggagaggtccctgcccacgccagacccgtccccggccgtcgcggcaccctcttgtgatcaggcggagggaccaagggccaagagcggggcttcgccggacgctgggagcgtcactgtccagactgacagatggggaaactgaggctgaccagctgggcagggcgtgcatacgaatctgggtcctggaagcgttctgcaagatcccttctcacctcaaccgcacgtgctggcatccttgggtttccctccttccccagatcacagccgcacttctctcctccgccctcatagtcacggccctgccttctccctcctcttgccccgggcgggccccgcccagaatgcggagaggccttcgaggaagcgcggaccaatcggaggccctatgtagggctgaagaggcgggactctggtcgccataacaactcatcacgcctgtgctgcgcgcgcgcgtcgccttagtgccgcagccctattacgtgaggtagggaaggcgcgccagactcgacggccaatcagggacccgagggcgatgttgccatgacgaccacgttgcgctggagattgcgacgggggctgaaaccgcggggaactcggggagcgagtggtgagaacagtgagcaccagcactccgatggcgctggcgagaggaaaggctgcggcgcgcagagcgaggctgcgggaccccaggatgggggacaggaggctgcggggcctcaggtgagcagcaagcgagagaccagtcccttcgagcgccctcacgcgttttgtccccacgccacgccggggacgagtctgtggcacagactcgtccccggccccgcgggcttaagttgtctgggggctgtcgctttgagtacagatcatatagttatgaatacattttaacgcagatccaaacacatagtataacgtgaggatcctatataaagtgagactcctcaaaaaaaaaaaaaaaaaaagatttttttttttttttagccggacgtggtggcgggcgcctgtagtcccaaccactcgggaggctgaggcaggagaatcgcttgaagccgggaggcggaggcttcagtgagccgaaatcgcgccactgcactccagcccgggcgacagagcgagagactccgtttgggggggtaaagtgtttttttaaatgcagtcaaattcgaacgtaggttgataggatcacatagttgatccactctaaccccacacccacttgcagacctggttagtgctgaggtcctctcatcccagggagtaggctagagttcgcactggctcccctggggcccggcttggcgtggcaaagctgggagtctcgccctaggttggggtttcctctgctctgtaagcctctgcagaaggagcagagggtggtgggagaagaagtgcccaagaggggccacaagctacctgtgatctgtgtccccccaccagggggatgggtgctttcatttttatcgttgtggaaaatttcacattaagtacttctccaaagaatctcccagacatctacttgttctttcaaaacataacagatttttttaaaaaacaatttacataccatataatttgcccattttgagtgtacaattcaaggctgggcgcggtggctcacgcctgtaatcccaccactttgggaggctgaggtgggcggatcacctgaggtcaggagttcgagaccagcctgaccaacatggagaaaccccatctgtactaaaaatacaaaattagctgggcgtggtggcacatgcctgttatcccagctcctcgggaggctgacaggcaggagaatcgcttgaactcgggaggcggaggttgcggcgagccgagattgcaccattgcactccagcctgggcaacaagagcgaaactgcgtctcaaaaaaaaaaaaaaaaaaaaaaaaaggccgtaggtctgaatagacccctcacctaagaaaaatagatacatagctggcaaataggcacatgaaaatatgctccacatcatatgccattagggaactgcaaattgaaacaataatgagatactactatacatctattagaatggctacaatgcaaaacactgatagcaccatatgctagcaaggttgtgaggcaatgggaactctcgtttactgctgatagaaaggcaaaatggtatagccactttggaagacagtttggcagtttcttacagaaagttaaatatagtcttaccatatgatacagcaatcacactcctgggtatttgcacaaatgagttgagaacttatgtccatgcgaaaaccacacaaattattatagcagctttattcataattgctcaaaacttgaatcaacccagatgtccttcaatagataaatggctaatctgtgttacatccacacaatggaatatcattcagcaataaaattaactgtgctaccaagttatgaaaggcatggaggagtctgaaatgcacattggtaagtgacagaagccagactgaaaaagctacatactgtatgattacaagtttatgacattctggaaaaggtaaagctatagagacagtaaagcagtgactgccagggactcagtgggagggagggagggagggagggaggaatgaatagtagcacaagtaatttttgggggcagtaaaagtattttgtactatattgtaatggtggatacatgaatttatgcatttgtgaaaacccatataatgtacattaataataatgtactaatattcattttacaatgttaacaaatgggccgggtgcggtagctcatgcctgtaatcccagcattttgggaggctgagcggggcggatcacgaggtcaggagatggagaccatcctggccaaaatggtgaaaccccaactctactaaaaatacaaaaattagccgggtgtggtggcacgcgcttgtcgtcccagctattcgtgaggctgagacagaattgcttgaacccgggaggcggaggttactgtgagatcgtggcactgcactccagcctgggtgtcagagcaactccgtctcaaaaaaaaaaaaaaaaaagaagaaactaaaatgaggtccaatgaagtagtgccaggaaaaacataaatgaactaactattaagcccaggaaaggtaagtggttaagagagaactttggtctgagacttcctggaatcaaactgtagcactgcctcccactggctttatgactcagggcaaatacttagcctatgggagactcaggccctggaccctctactcctctgctccacccgtgggagagatcaggcccatctcacagaggaacagattttttttttttcttttttttttattgatcattcttgggtgtttctcgtagagggggatttggcagggtcacaggacaataggggagggaaggtcagcagataaacaagtgaacaaaggtctctggttttcctaggcagaggaccctgcggccttccgcagtgtttgtgtccctgggtacttgagattagggagtggtgatgactcttaaggagcatgctgccttcaagcatctgtttaacaaagcacatcttgcaccgcccttaatccattcaaccctgagtggatacagcacatgtttcagagagcacagggttgggggtaaggtcacagatcaacaggatcccaaggcagaagaatttttcttagtacagaacaaaatgaaaagtctcccacgtctacctctttctacacagacacggcaaccatccgatttctcaatcttttccccatctttcccccctttctattccacaaaaccgccattgtcatcatggcccgttctcaacgagctgttgggtacacctcccagatggggtggtggccgggcagaggggctcctcatttcccagtaggggcggccgggcagaggcgcccctcacctcccggacagggcggctcgccaggcggggggctgacccccccccccacctccctcctggacggggcggctggccaggcagaggggctcctcacttcccagtaggggcggccgggcagaggcgcccctcacctcccggacggggtggctggccaggcggggggctgacccccccacctccctcccggacagggcggctggcagggcggggggctgacccccccacctccctcccagatggggcggctggccgggcagaggggctcctcacttcccagtaggggcggccgggcagaggcgccccgcacctcccggacggggcggctggccgggcagggggctgacccccccacctccctcccggacgggtcggctggccgcgcggggggctgacccccccacctcccttccggacagggcggctggccgggcggggggctgacccccccacctccctcccggacggagcggctggccgggcagaagggctcctcacttcccagtaggggcggccgggcagaggcgcccctcatctcccggacagggcggctggccgggtgggggactgatccccccacctccctcccggacggggcggctggccgggcggggggctgacccccccacctccctcccggacgaggtggctgctgggcggagaggctcctcacttctcagacggggcggctgccgggcggagatgctcctcacttcccagacggggtggctgctgggcggaggggctcctcacttctcagacggggcggctgccgggcggaggggctcctcacttctcagacggggcagttgccaggcagagggtctcctcacttctcagacggggcggccgggcagagacgctcctcacatcccggacggggcggcagggcagagatgctccccacatctcagacgatgggcggccgggcagagacgctcctcacttcccagatgtgatggcggccgggaagaggcgctcctcacttcctagatgggatggcggccgggcagagacgctcctcactttccagactgggcagccaggcagaggggctcctcacatcccagatgatgggcggccaggcggagacgctcctcacttcccagacggggtggccgccgggcagaggctgcaatctcggcactttgggaggccaaggcgggttgctgggaggtggaggttgtagcgagccgagatcacgccactgcactccagcctggacaccattgagcactgaatgaacgagactccgtctgcaatcccggcacctcgggaggccgaggctggcggatcactcgtggttaggagctggagaccagcccggccaacacagcgaaaccccgtctccaccaaaaaaaatacgaaaaccagtcaggcgtggcggcacgcgcctgcaatcgcaggcactcggcaggctgaggcaagagaatcaggcagggaggttgcagtgagccgagatggcagcagtaccgtccagcttcggctcggcatcagagggagaccgtggaaagagcggggggggggggagggggagggggaggagggaagaggaacagattttcaagaacgatttgaggatatgtattagcccaggacatgttatgggatgaccagtgtcttcaaactaggcagaaagaggggacagggtacaggagtcaggggaagtaggcgaaaaggtggactgtttagtaggggatcaggaacatagaaaagtggcaaggctagtgaccttggtacccagacaccaggggtataactcaggtaccaggtgtgagaacagctcaattccagggatacttccatccccagcttgcaatctccatggctgagcctctttgataacttttgtgctattcctggtttcaagtctacctggtccatcaatcagtgctcttgtctgcactccagttgggggaactcatgaactgtaaagggcaatcctgtgggggaatgaacaggttggtcagtccagcctagggcagactgacccaccatgacagtccaggggtactgatgacaggcatgtaccatgagcttgggggtgtcccacctgtgtctccactggagagaatacacaggtgtcactgaggaacagggttgcaaggactgaggatatggggtcagctgaggacatgttaaggagaggcaaacattgcacagctaggcactaaggagagagaaagggacacagcggggcatggccagaaaactggaattgagctgagtggaggcaccaagacctgcgagggcacaggctgggcaccaggtgtgagaacagcccactcctgggggcattcaccaggggtagatctcttcagggtccctctgccacaactagttttgagttcatatggtccacctgctggtgggaatgtagaagccttcagacctatgaaggatgatgagtttttgagagtccaggccaggagaggccaaaacaccatgaccccagcaagcgagaataatccttactccaagacaaacacagacctgcaaaaaatgaacattcagggaaggctcccaggcaggacccagtgggcccacacgcacccatgtcagtgcatgcagtgcctggaatcttacaggaagtgaccgagctgaacgtgaccagctgtgaagattcagagacttctgagccccgatcttggccactcacggcccttgggtagaatgtgtggggtgtccactcagccacttgttagaggaggtggcatgatctgggcctcagtgccacgaccaacagcgacttccaaggggaacatggaaagaacagaggaaaaaaaccagagttgaggctggggagagttatggtgccagtggtctcacccagcactgagtgcaaagttctccagcaccacttcaggtagaagctcctctggaccttgcctaagaactccgttcgtccgggaggacgcaggcccacctgctctaacatgaacgcgtctgaattcagcggaggacacccaggagcccggttattctcctgccagcgtcctcccctgatgtgtccctgaccccgtgctctgacgtactcagccatgtactcactctcctctcccaggcccccatacctgagatcaccatggcctgatatggggtagactacaagcctaccgtgcctcagccatgtgcagggcgacctgtccctggcatccacacctgtggcccatacgtcgcccgcattgtggggcgccgaaaacccaacacaactgaaacacaactgctgaccttccccctaagccgcctctaaacgaggtccctcggcccctggtcccagccgctctttgaagacttgcctgatgacaggcatgtaccatgtttttggctgggacatttttctgagccttgctccgggctccgtaaagcggacacggtgccagggagagaatttcggggcggttgcgggcacaggcgggcttctgcggaggccctggcgaacgcccccgcgcggcgcggtccgatggccccatggggccgcccctccactgtgaggtcaccggggttcagcaacattcactgcggctaggacgcgtacaggtcactgaggcagaacttcccgattctcgcgccttcgttcgtttctgcggaccagcggagactcctccacaccgcccaccgcccaatgatcccactgccgcaaaccgccccaaagccagcgccgaaagccgacgccggaagccccgccccacgcagggcccgcccgaacgttcccgttcctgggccgccattggccaagtctgaacggccccacgtcgaggctccttatgggaaatgtagttcacgtcccgcttcaggagctagcggcgccctcccttatcgccttggcaacgacccagccgcgccgcgaggagagccgggaatggaggtcgtggcgtgaggggcgccgagcgaggggaggcgcgggccacgggagttccgggagttccggcgttgcccggcagtccgcagtcctcggcgggaaggctgtcccggcgcctcaggcagctctgcgtgggccggggtgacttcctcgcgatcccctgcgcgaggtgaagggcagggacctttgccgcgccttccacgcgccgtgccccaccggcgagtggctccatcttcctcagacttatcgctcgcggacaggcgccgtgggtctcccgggcctccgtaccgtcctccttcccagcggctccgggaagcggttccctgtcttcggacgcatttcacccgcgcggggagagcttcccgggaaggttccacggcggccgagggtttccgcgcccgggacgcgtttcggctgaggccgtgggtccagtccacgggttctgcccgcacggtccaatggccggggaggcggaggtgagcagaggatgcctccgaggaatgagggggcccaccaggtggggggcggcgtgtgccagggcagagttggaggagggcaggagatctgcgtatgattccagggggaggtctttgatgcacggctggggcatgcccttggcagtgggagccattggagatgtgccgcaggactgggacaggatggggtcgtagttgctgtgccaggccctctggagacgcatgtgcagaacggcgtgtggaaggccaggcaattgcctatagggtaaactggggacgttgtgctgggggtgtacagttttaggcattctgttgtccagttttgtgcctgttgagcaggaggcaaactggaccctgggaccaggtacttgagacctaagggagaaggatgagcataggtttggttgcgtctgagaggtatgatctctgggactggaattggcaggcaggagatagagtggagcctgtgcccttggccctgcacatagatggcatcagtctggtcaccaacctgatgtcgctttgggctggacacagtttccagtagtaacaccagaagcatcaataacaccagcagctctgatattcctctgggataggagaaggaaggtataagggtatgtgtagggagtaaggtggggaagagtttagagctcatagggaaagataatgtcagggggagatgtgataggaccctgagatacaggtcaagggcctgaatgtgtccatctgtccatattttggttgtttttttctgcccatcattgaccccaaggctcagttggacccatcattgcagggcttggtgatgtttgaggatgtgacggtatatttctccagggaggagtgggggctccttaatgtgacccagaagggcctataccgggatgtgatgctggagaactttgcactcgttagctcactgggtaagtctcttacactgtcccccagcacactgactaccccctcattttccccatgcgaagttctgtccataacgaagccagaccatgggggctctttccttcccagattccctgttgtaggtattgtgggtggtgggactcggtggtgggactcggcggtgtgctctttccctgcctttctctgagcaatgctgttggcagcctcaacacctcttgccccaggagctagtggagcaggttttgggggtcagatgtttcatagtttgcccaccaaatcccaccaagctctgccttttcctggccatgtgactctcttgaagacatggcttctctgtgctctgggttttgcctccctacaaaagaaattttacagggacctccctgggccaggcttgagccatgaattttaatcagaacggtttgggaaatatatatatatatatatatatatatatatatatatatatgtgtatatatatatgtatatatatgtatatatatgtatatatatgtatatatatgtgtatatatgtgtatatatgtgtatatatatgtgtatatatgtgtatatatgtatatatgtgtatatatatgtatatatgtatatatatatgtatatatgtgtatatatatatgtatatatatatatgtgtgtatatatatatatatatgtatatatatatataatttttttttttttttttttttttttttttttgagacagagcctcactctgttgcccaggctggagtgcagtggcgcaatctcggctcaccacaacctctgcctccagggttcaagcgattctcctgcctcagtctcccgagtagctgggactacaggctcgcgccaccatgcctggctaatttttgtatttttagtagagacagggtttcactttgttggccaggctggtcttgaactccggacctcatgatctgcctgccttggcctctcaaagtgctgggattacaggcgtgagccactgcgcctggccacaaaggtacttctttcgttaaatttattcctaagtactttattcttcactgttaagtatggtgttagctgttggttttttgcagatgcccatttcaggtgaggaagttcccttctctttctagttcatttaatgtgtttattaagaaaagtcatggccaggtgcagtggctcatgcctgtaatttcagcattttgggagggcgaggcaggtggattacctgaggtcaggagttcaagaccagcgtggtcaacatggtgaaaccccatctctactaaaaatagaaaactagccaggtgtggtggcacatgcctgtaatcccagctactagggaagctgaggcaggagaatcgcttgaacctgggaggtggaggttgcagtgagctgagatcgcaccattgcactccagcctgggcaacaagagtgaaactacgtctcaaaaaaaaaaaagaaaagaaaggtcactagattttgtcaaatgcttttccaatgtctaatgaaatgatcatgtgatttttgtcctctcttctgttaatgtagtatattagaataattgattgccttttctttttttgagacggagtcttgttctgtcgccaggctggagtgcagtggcgcgatctcggctcactgcaacctccacctcccgggttcaagtgattttcctgcctcagcctcccaagtagctgggactataggcgtgcaccaccacgcccagctaatttttgtatttttcgtagagatggggtttcaccatgtttgcaaggatggtcttgatctcttgacctcgtgatctgcccccgtcggcctcccaacactaattgttgattttcatatgttcaaccttgcattactgggataaattccctgtcatggcttataatacttgtttttttttttttttttttttttagacagagtcttactctgtcgcccaggctggagttcagtggcatgatctcggctcattgcaacctccacctcttgggttcaagtgattctcctgcccccgcctcctgagtagctgggttacaggcatgcaccactatgcctggctaatttttttatttttagtagagacaggggtttcaccatgttggccagggtggtctttttttttttttttttttttgagacggagtctcgctctgtcgcccaggccggactgcggactgcagtggcgcaatctcgactcactgcaagctccgcttcccgggttcacgccattctcctgcctcagcctcccgagtagctgggactacaggcgcccgccaccgcgcccggctaattttttgtatttttagtagagacggggtttcaccttgttagccaggatggtctcaatctcctgacctcatgatccactcgcctcggcctcccaaagtgctgggattacaggcgtgagccaccacgcccggcctggccagggtggtcttgaactcccgacctcaggtgatccacccatctcggcctccaaagtgctgagattacaggtgtgagccaccacacccagccagtggtgtagttttcttataatgtctctgtattgagtatgagggtaattttggcctcaatggatgagttgggaatgtttccttctcttctgttttctggaagagtttcttaagtattggtgttaattcttatttcagtattgttagtattcacctttgaagccatcagggcttggggttgtgtgtgttttggggggaatgttttttaataacaacaagaaaaccctctttgttacatttgtatttagattttctgtttcttcttgactcagttttgatagtttgtgtctacttgggaatttgtccatttcatctaagttatccaatttgttggcatacatttgtacatagtatttcattattttttaatttttataaggttactagtgatgtcctttttccattcctgttcaaagtagtattgagtcttctctctgttttttgtcactctaggtaaacatttgccaattttgttgattttttcaaagaaccaaattttggtttgtcggttctctttttctaatctgtttcattcgtttctgctctaatttttattatttccctccttttgctatctttgggtttgtttttctttttcttgttccttgaggtataaagttaggttattggtttgagatcttttaaaatatgggtatttatagccataatgttcctgctaagctctgcattttctgcatcccataattttttgtttgttgtggtatttttttctttttctttttctttttttttaatttttctttttgagatggagtcctgttgcccacgctggaatgcaatggtgcgatctcggctcaatgcaatctccacctcctgggttcaagcaattctgctgcctcagcctcccaagtcgctgggattacaggcatgtgccaccatgcctggctaatttttttttttttttgaggtggagtctgatgcctcccaggctggagtgcagtggtgcgatcttggctcactgcaacctccgccccccaagttcaagcgattctcctgcctcagcctcccgagtggcatggtccaccacacctggctaatttttgtattttttttttttggtagagacagggtttcgccatgttggccaggctggtcttgaactccagaccacaggtgatccacccacctcagcctaccaaagtgctgggattacaggcgtgagccaccacccggcctgttgtatttttcttttcttttctttttttctttttttgagatggagtcttgctctgtcacccaggctggagtgcagtggcactatctcggctcactgcaagctccgcctcctggattcatgccattctcctgcctcagcctcccgagtatctgggattacaggcgcccaccaccacgcctggctaatttttttttgtatttttagtagagacggggcttcactgtgttcggcaggatggtctcaaactcctgaccttgtgatccacctgcctcggcctcccaaagtgctgggattacacttgagccaccacacccagccctgtgtttttattttcattcctcccaaagtacttgtaattgtcatgtgatttattttttctttgactctggatttttaggaatgttttgtttaaattccttaaatttgtgagtttcctaaatttctttctgttgttgatttctgttttaattcatttgtggacagagaacatacttgacattatttcaatcctttgaaatctactgaggcttgctttatttatttatttatttattttgagacagagtcttgctctgtcgcccaggctggagtgcagtggcgcgatctcagctcactgcaagctctgcctcctgggttcacgccattctcctgcctcagcctcctgagtagctgggactacaggcgcctgccaccatgcccgggtaattttttttttgtatttttagtagagatggggtttcactgtgttagccaggatggtcttgatctcctgacctcatgatctgcccgtctcggcctcccaaagtgctgggattacaggcatgagccaccgcgcccagccgaggcttattttatatcctagcaaatggtatgttctgaagaccgttccatgtgcacgtgacaatgtatatcctgctgttgttaggtggcaagctctatagatgtctgttaggactagttggttttcattgttgttcaagtctgctgttgttattgatggtgggaaattacaatcgttattattgctgaacagtctgtttcttcagttatgtcagttttgcttcatagaaaggcttttttttttctttttgtttgtttgtttgtgtttttgagacagagtctcgcactgtcgcccaggctggagtgcagtggtgtgatctcagctcactgcaagctctgcctcccaggttcatgccattctcctgcctaagcctcccgagtagctgggactacaggtgcccgtcaccacatccgcctgatttttttgtatttttagtagaaggggggtttcaccgtgttagccaggatagtcttgatctcctgacctcgtgatccgcccaccttggcctcccaaagtgctgggattacaggcgtgagccactgcgcccggcctgtttgtttgtttttgagacagggtctcactctgttgcccaggctagagtccaatggtgtgatcgtgactcactgacgctttgacctcctaggctcaagtgatcctctcactatggcctccctagtaactgggactacaggtggtgcatgccatcatgcctggctaattaaaataatatattttttgtagagttggggtcttactgtgttgcccaggctggttgcgaacgtctgggtttaagtgatctcctacctcactttccaaagtgctgggattacaggcatcagccaccatgcccagcctgtttcttttactacctgtcacccgcaggacttgcaccttcgagatcccctgtgtttacccagctggaggatgatgaacagtcgtgggtgcccagctgggtggatgtgactccagtcagcagagcagaagccaggagaggttttggtcttggtaagtggagtggaggggaataccttggtttcagcagtgggctcacagaatgctgagtacctgcatacaccgataccttggtgttgagggcagtgaccataccttatttccttccacctttcctgtcttatgtggacactgtgcagtctgccatctctaccatgattttcaggccccgcatgttcctgcctctctggcctgcgtctcctcattgcccttctctgtatctgtgcagagctgtctactgttggcgactcagtgcgtgtcttgaaatgtgcacatatccttaaacaggtatttgaacttcagccaatccttaattaatacttaaacaccagctactattttggaatcacattttgctgggactagacacatgcctcctcatagtgcttggctgtcaccagcagccaaggccctgctgaaaccctttgcagaggagtgacttggagaccccacctctcttccctgcaccatatcctatcttgtgccctcatctcagttgaggttttccttagtctgtagtctggtggagccatattcagttgtgccaggctttcccaacccagacctttcctagcaacctctcagcaattcttttttttttaagatggagttttgctcttattgcccaggctggagtgcagtggcgcaatctcagctcactgcaacctctgcctcctgggttcatgccattctcctgcctcagcctcttgagtagctgggactacaggcgcctgccaccatgcctggctaatttttttttttttttttgagtcggagttttgctcttactgcccaggctggagtgcagtggcgcgatctcagctcactgcagcctctgcctctggattcaagtgatcctcctgcctcagcctcccgagtagctgggattacaggcatgcatcaccacacccggctaattttgtatttttagaagagatggggtttcgtcgtgttggtcaggctggtctcgaactcctgacctcacgtgatctgcccgccttggcctcccaaagcactgggattacaggcgtgagccaccacgcctggccctttcagcagttctatggagtccttctgggtgtgtctgacatgcactggtgattaaggtacctcctccctctagttcaactcttagtaatgattcatctctgctttcagatggtttgtgtagagtggaggatgagagagcccatcctgagcatctaaagagctacagagtcatccagcaccaggacactcatagtgaggggaaaccaagaaggcacactgagcatggggcagctttcccacctggttccagttgtgggcaacagcaagaagtccatgtggcagagaagctgttcaaatgcagtgactgtgggaaggtgttcttaaaggcctttgccctccttgaccatctgataacgcattctgaagagagacccttcagatgcccaacaggcagaagtgctttcaagaagtcagctcatattaacccccgaaaaattcacactggagaaacagcccatgtgtgtaatgaatgtgggaaggccttcagttacccgtctaagctgaggaaacaccagaaggttcacacaggcataaaaccttttaagtgtagtgactgtggtaaaaccttcaaccgcaaagacgcacttgttctacaccagaggattcacactggagaaaggccttacgagtgcagcaaatgtggtaaaaccttcagtgttctgtctaccctcattcggcaccggaaagtgcacattggagaaaggccctatgagtgtacagaatgtgggaagttctttaaatacaataatagcttcattcttcaccagagagttcacactggagaaaggccttttgaatgcaagcaatgtgggaaaggctacgtgacccgttcaggcctctatcagcactggaaagtccacactggggaacggccctatgaatgtagcctgtgtgggaaaaccttcactaccagatcctaccgcaatcggcaccagcagttccacactgaagagaggtcttatgaatgtacagagtgtgggaaggccttcaaacatagttccaccctccttcagcacaagaaagtccatactccagaaaggcgtcaggaggacagggcacatgggaaggtcgttagctgctagcaccgtgttcatcaggaaaggtcttattccagaaaggaggttaaggagagtggccgtgagagtgccatccgaaagaagctaaaccttgcacatcccaacacccaccccagggagagttcccgtgtgtgcctggtgtgtgggacgctttcgggagccacattgcactctgacttgcctggggctgttggcagtgtcacatcactgagtttatccaccgccatccacctctatccaccccataaggtccctacagcaagtgggacagcagaccttgtgctccttgctctaaacagtagagaatcgttaatagtggagcccaaaacaggcctcattccctacccttgactggtttagctgtggacatgacccacctctggccggaggagctgagctggtatctgctgggggcttcctgggaaggtttaccattttcatggaaatggttgacattacacatggtatttgtcatgccctagcatggactgtctcatactgctctggactatgtggtaataaaggctttattgtttaagccgcttaaaattttttttttattttttttttgagatggtcttattctgttgcccaggctggaatgcagtggtgccatcatagctcaccacagccttgaactgctggtctcaagggatcttcctgcttcagcctcctgagtagctggcactacaggtgtgcgccatcacacctggctaatttttttttttcatttgtggacagggtcttgctatattgcccaagctggtctcgaactctgagcctcaagctatcctcctgccttggcctcccaaagtgctgggagccactgtgcctggcctagtttttttagagacagggtctcacagtcttgcccaggctggagtgcagtagtgtgaagctagctcattgcagacttgaactactggactcaagtgatcctcctgcttcagcgtattgaatagctaggattgtacttgtgtggcaccacatctgactaattttaaaaatttgtatagagacaggatcttgctacattgcccaggctggtcatgaactctttgcctcaagcagtcctcttgcctcagccttccaaagtgctggtattatagttgtgagccactgtgccctgccaagtctcttttaatattgaggttctgatccctgtgtgtggagagattgagaatagaatccggcactatcaccgtaagttgagggaatggcttttgtggaggtggtctcttgagttttttctgcctcagtggggatggcaggatgacagaaaatacctctagtcaaggttggcctaatttgtattggcccctgagtcctccagggaaagacttgtagcctggatgtcaggcttttttgtgggtccagagctcaccttgcggaagggaatagttggtgagagatcttctatatgtttatggacataaaaagttgggttccttgttcccagggaatgttccagaacttccagcattggtcagaaggagctgtttccagattcagctcaaaagtcatattctccaaaatctggaacatggaggtaagttatagactgactctaagacctataggggcctgttgggtagagtaatttgagtagagtaagtgggcatagaaatattgagtgaagtagtatggagtgaagtgtctgataaacaagaggatttcagccagttctaaagaggcatccacaaatgttccagcaactgaggtttcctggggtgagggcaccagaacttctcagcaattgcagacctgttatttgtgtcaaggtcactgtcagcaaataatctacagactttctggattctcatatcctctctgggctgttcacctctcatggccattatcctgagactgaaagattctatagtcctgggatgtgccttttgtgacccagccagtactcctggtgtctggatgctgtggcctttgcagttgtcaagtttttgctgtcatggtgtcagggctttccctctggggctcaagagagacacgtagggtaaccaaagtatggatccagatcttgcggtttatgggaccttttcagagtcttgctgtgtcacgcagcctggagtgtagtggtatgatcacggctcactgcacccttgactccagggattcaagtgatccttctacctcagcctcctgagtagcagcgactacagttacacaccaccacactcagctaattaaagaaaaaatcgttttaggctgggcgtggtggtcgatgcatgtaatcctagcactttgggaggccaaggtgggcagatcactttaggtcaggagtttgaaaccagcctggccaacatggtgaaactccacctctactaaaaatacaaaaaaattggctgggtgcagtggctcacgcctgtaatcccagcactttgggaggccgaggcaggtggatcatgaggtcaggagatcgagaccattctggctaacatggtgaaaccccgtctctactaaaaatacaaaaaaattagcccggcatggtgacgggcgcctgtagtcccagctacttgggaggctgaggcaggagaattgcttgaactggggaggcagaggttgcagtgagccaagatctcaccactattctccagcctgggtgacaaagcaagactctgtctcaaaaaaaaaaaaaaatttgggagtagggggtcaggattggcggctcatgcctgtaatgccagcactctgggatactgaggtgggaggatcgcttgagccgagaagttcatagaccagcctgggcaacatggcaagaccccatctctttaaattttttttttttttaagagacaaggttttgccatgtgcccaggctgatcttgaactcttgggctcaagtgatcttccagcctcagactcccaatgtgctggggttggtgtgacactgttcctggcttatacccacttttattttattttattttttttgagatggagtcactctgttgtccaggctggagtgcagtggtgtgatctcagcacactgcaacctccgcctcccagggtcaagtgattctcatacctcagtctcccgagtagctgggattataggcatcggccagcatgcccggctaatttgtatttttagtagagacggggtttcaccatgctggccaggctggtctcgaactcctgaccttgtgatctgcccacctcagcctttcaaagtgctgggattaccggcgtgagccaccgcacccagcctatatacccacttttaaagacatacgagatgctaaatgttattcagaatgggctagaaaatgggtggtaacttccagctgttgccatgctaaggggcagtaacttccgagtgttgccaaggcagtggcaaactgccatggcaatggcgggcctgtcttacggggaagtgctttcagcgccttttcctgatttcagcgtcttcaacctgctctggagtagagtcccatctgcctcctacctcagcttcacaaaaatcccttgaaggaggaattatcttcattttccattgctcccccacttccccagactggctgctggataggatattgatcaccttgctgcctatagaaatctcagtgctgcttttttagggggaacggaagccaatccacattgtaatttttttttcttttgagacggagtctccccgtcacccaggctggagtgcagtggtgcagtcttggctcccaggttcaagtgattctcctgcctcagcctcctgagtagctgggattaacaggttcgccgcaccatgcccggctaatttttgtatttttagtagagacagcgtttcaccatgttggtcgggctggtctcgaacccctgacctcgtgatccgcccacctcggcctcccaaagtgctgtgattacaggcgtgagccaccgtgcccagccatgtaattttaaaaatgtaatttataagagcataaaattatgaaatacttagaaataaatttgacaaaattatgcaagacttgtacactgaaaactacaaaatgttgctgagagactgattgaagaatacctaagtaaatgaggacatttaccatgttcatgaactggaagtctcaatattagtatgttaatcctcccaaagttgatttgcagattcaatgcagtcccaataaaaatgtcactaggttttgttgttgttgtttttgactcgctctgtaacccaggctggagtgcagtggtgcaatcttttctcactgcaacctccgcgtcccgggttcaagcgattcgcctgcctcagccccccaagtagctgggactacaggtgtgtgccaccacgcctggctaatttttgtatttttagtagagacagggtttgctatgttggctaggctggtctcaaactcctaacctcaagtaatctgcccctcttaccctcctaacatgctgggattacaggcatgagcagttgatcaaattcaacatcccgtcatggcagaaactctcaactaggcgtagaaggaacatacctcaacataataatggccatatatgacagacccacagctaacatcttactgaatggggaaaggctgaaagctttttctctcagaactggaacaagacaaagatgcccactttcaccactcctattcaacatagtactagatgtcctagccaggcaagagaaaagaaaaggtatccaaattggaggagactaagtaagttgttcctgtttgcagatgacatgatcttatatttagaaaaacctagaccccaccaaaaaaactcttaggtctgataaagagattcagcaaggtttcaggatacaatcaatgtacaaaaatcagtagtgtttctatacaccagtaatgatctagctgaaaaagaaatcaagaaggcaatcccatttatgatagttaccaaaatatacctgggaataaatttaaccaaggaggtgaaacacctctacaaggaaaattacagaacattgataatagaattgaagagacctttggattcatcctcacattcttcctcttctgcccacaaataacccccttccaaaaaaaaaatgatacaaacaaatggaaaaacatatgctcatggattaggagaattaatatattttgttttgtttttgtttgttttgagacagagtctcgctctgttgcccaggctggagtgcaatggcacgatctgggctcactacaagctccgcctcccgggttcacaccattcttctgcctcggccttcccagcagctgggactacaggtgcacgccactatgctcagctaattttttgtatttttagtagagacagggtttcaccgtgttagccaggatggtctcgatctcctgaccttgtgatctgcctgcctcggcctcccaaagtgctgggattacaagcgtgaaccaccacacccggctgttttttttgagacggagtcttgctctgtcgcccaggctggagtgcagtggcgcgatctcggctcactgcaagctctgcctcccggggttctcgccattctcctgcctcagcctccagagtagctgggactgttggcatgtgccaccacgcctggctaattttttgtatctttagtagagacaggttttcaccatgttggccaggctggtctcaaactcctgacctcgtgatctgcccagcttggcctcccaaagtgctgggattgcaggcatgagccactgcgcctggcagaagaattaatattgttaaaatgaccatactgcccaaagcaagctacagattcaatgcaatccctatgaagatatcaaatgcattttttccccacagaattagaaaaagttctcagagctttgtagaatcaaaaaagagcccaagtagccaaagcaatcctgagcacaaagagcaaagctggaagcatcacactacctgacttgaaaatatattacaaggctatagtgaccaaaagagtgtggtattggtataatagtcacatagaccacggaaacataatggagacccagaaataaatccagatatttacagccaactgattttcaacaaagatgccaataacatacattgggaaaggataccctcttcaataaatccaaaaactagatatccatatgaatgaaactagacccccatctctcaccgtatacaaaaacaactctaaataaagacttaaacatatgactcaaaactgtaaaactactagaaaaacaagggggtcggggcagtggctcacacctgtaatcccagcactttgggaggccgaggcggacggatcaccagaggtcaggagttcgagaccagcttgactcacatggtgaaaccccatctctactaaaaatacaaaaaaaaaaaaaattagccaggtgtggtggcgcatggctgtaatctcagctacttgggaggctaaggcaggagaatagcttgaacccaggaggcggaggttgcagtgagctgagatcgcaccattgcactccagcctgggcaacaagagtgaaactcagtctcaaaagaacaaaataaaacaaacaacaacaacaacaacaaaggaaaaggaaaagcacgtgttgggagaaaatatttgctaaatatattcgacatcttttatctcaaatatataaataacacttataactcgattataagttaataatcatccaaagtttaaaatgggcaaaagatctgaacaaatatgctttgaaagaagatatatggttatcaaatacacacttgaaaagttgttcaacgtcactagtcattcaggaaatgcaaatttaaactatgatgagatacaactactacacatttattagaatcgttaaaatgaaaaagacaaacatacaaatatatggcaagaatgtggagcaactagaactctcagtgagttctaatataagtgtgataaatttttttgaaaacagtttgacagttcttaaaatgttaaacataaaagccgggtatggtggagtgcacctgtagtcccagctacattgggcaggaggatcttttgagcccaagagtccaagtccagcctgggcaacatagccagaccctgtctcaaaataaaaacaaaaacaaaacaaaacaattaaacatacacctaccatatacccccaaaattccacttctaagtatctacccaagagaattcaaaggatatattaacacaaggacttgtacacaaatgtttatagcagcttcatttgagatagtcaaaagttagaaacaatttggccaggcactgtggctcatggctgtaatcccaccactttgggaggccgaggcgggtggatcatgaggtcaggagtttgaaaccagcattgccaacgtaatgaaacctgtctctactaaaaatacaaaaaaaatcagccaggcgtggcggtgcacacctgtagtcccagctactcaggaggctgaggcaggggaattgcttgaacccaggaggtggagcttgccgtgagccgaaattgcgccactgcactccagcctgggcgacagagccagactccatctcaaaaaaaaaaaaaagatggggtcttgctctattgcccaggctggtcttaaactccccggctcaagtgatcctcctgccttggcctaccaaagtgctgggattacaggcgtgagccatcacgcccgactgaacctcttttccttataaactatctagacttagatttttccttccttccttccttcctgtcttccttcttccttccttccttctttccttttttttttttttttagacagaattctgctcttgtggcccaggctggagtgcaatgccgtgatcttggctcattgcaacctctgcctgccgggttcaagcaactctcctacctcagcctcccgagtaactgggattacagccgccaccaccacgcctggctaattttttgtatttttaatagaaacgccgtttcaccatgttggccaggctggtctcaaactcccaacctcaggtgatctgcctgcctgggcctcccaaagtgctgggattacaggcatgagccaccatgcccagcctgagatatttctttatagtaacacaaaaacagcctaacaaaaaggtcacatagtaggtaggatttagtaagaaagagagctgagatttcaaggcaggtgaactgggtctaatgtttccactgctttactcacctctccctacctctagatttccaccctcccatgttgaaatctcttggttataaattttcacttgtgcttctttcttagatcaccttcttgaatcacagtggtgtctattttcatatccattgagggtatagtgattccttgagggttacaaggtctgcagatcgatgagttcttggcattttggagaggccagagactggtagctctgagtcattagttgtcaggccatgcctccccatcaaacaatcgaagcttggctgacttctctgagtgccagaagaaggctggggctgggggtagaggatctgggtttcacaagaggcgagtctggaaatgtcaaaattggggtccaaggtgagaggatggcgtggtaggacaacattgtctgccatccgtgtataatggctgaagctctggttagtgggtgtggcctaaggagaatgtagtgattcccactgtcggtgtaaagggcttcatattgatggagagttttctgtgttgtcagaagttctggtggacactgtgagacagatttcatggatttatagatgagacagctgaagcttgggagtctgtgccccagatcgcacaatttattagcagtaggagtccaagttgagccaagccagagaaggttactgagtgttttggcacccttggccttaatctgctgctcttcagatttcacagcccccatgttccagatagttcactcaaagcttgggagttggagatgagggaatcaacagatgctgacactagcatgaaggagaggtatagctgatctggaggtatgattgggagaggttgagaagcctttcaagggtgtccctgatgtgggagggcacaagcaaaggcccaggggcaaggaactgcccagtagattccagaagagaactaccattgcatacagcagagtgtacaataacagggtagtcagtacactgcatcaaggggctgaaggcaactgccttttggtttgagcatagtctgaaagcagtggagccactgaatcccacaaaagctggtaacctggacagctcaaaagtcacagccatcaggactttgcctggaatattctggcattattggcaaacatctatcttcccctaacaggttggctgctgtatactgagacccagtcggagatcagaaggcaggttcagtagaaacacgtaggactctactcatgtattaggaatcttttttttttccttttttatttttattttttattatttttttgagacggagtttcactcttgttgcccaggctggagtgcaatggcgtgatctcagctcactgcaacctctgcctcccaggctcaagcaattctcctgcctcctgagtagctgggattacacgcatgcgccaccatgcctggcttttttctttctttctttctttctttctttctttctttctttctttctttctttctctttcctttctttctttctttctttctttctttctttctttctttctttctttctttctttccttccttccttccttccttccttccttccttccttcctttcctttcccttccttccttccttccttccttccttccttccttccttcctttctttctttttctttctttctttctttctttcttttcttgtagagatgggatttctccatgttggtcaggctggtctcaaagtcccaacctcaggtgatccgcccgcattggcctcccaaagtgctgggattacatgcgtgagctaccgcgcccagccttttttttttcctgttttagagacaaggtctcattatgttgcccaggctggagtgcagtggtgcaaacatagctcactgcagtcttgaactcctgggatccagtgatcctcctgcctcaagtagctggaaacaggcatgccacaatcatgcccagcaccatcttatgagatctaatcttggccactcacacagaggattgagctctgatgacgtgtctaccctaactttatttgcttagaaggctgagccccatatggctcagctaacctttaattctgatcccacatgtgtcttacatattggagacattagcatcttccatattggagacattacactcaggaaggaaggcctgagtagggtaggtatcccccagacacctcactgtgctggggagtatttgagaagccctgctgtaaactttgctgacggcaaaactgttgtggcttctgctcacaatgtggttatcattgtccatcccctcaggggcttccaggagacgtggcagctgcagtggcctctgatccatcatacagtatggatggacaccacaggccaaagattctcatgtcagaggatttccggtcttttctcccctaggcctcaggaggacccagggaaatatctaaagccaacctatagttttggtgaactgagtttgcattgaaatgtttttggaaatgattttcaacatttataaaatcacatgccacatagaaatctgaatatttggctcttcttggaaaaccaggagatatgggaaatctgtactgactccaccatattgtctccccaccccttaagagggacagacctgcttggtggccaccagaagtggaattatgaaggccacggccatatgattctcaagaaaccctggctactcacataagccactccagaccatgatttctgtcttctctgtcttgaggtgcctacctgtgcagtgatggccatgagatgaacagcccagggagtccacaggaaatccacaaaatatttatttgaatttcagttatgagtgacacataggtctgcatgtcctgagaagttctgtacacccttatctcacttggccatagtcattggaagtttctgatgtgcgtttagaacagacatgtcccctcttgtctaccacagtcttctccacacttagagtttttgtaccaatgatagttcccacatagccctggcaggtctgaaccagttatgcctgcctactgagttttatatttcatgagtcatgagccatgggcaggtactgggggatgtagctggtaaagtgggacatgcattgggaacagaggaccaaacttttgctgtggaggttctcaaagaaactaccccattcttcagagctagctctgggcccacaggtgacccttggtgtccagatcacaagattcagtccaagcctgtcagtctttcataggaggccttagggcaacaagacaaattcaaccaaaactggactgagcactcttcctgcccatgcggctgtttgagacactcagtgcccccttacaaaagctgttctttttatattaggatgaattgtttcaaaccacctcaccaactctgatgcaggtggctaaacattaaggcctttgttatctcagagagagacaggcagatccaggagtgagtgattgagactaaacagatcattcctaagtgtcacatgtagatgcaaacaatgtccatgaagagaaaccttttcttctattttagatggagtctcacactgtcgcccaggctggagtgcagtggcacgatctcggctcactgcacaccctgcctcccaggttcacaccattctcctgcctcagcctcctaagtagctgggactacaggcacccgccaccacacctggctaattttttgtatttttagtagaggtgggttttcaccatgttagccaggatggtctcgatctcctgacctcatgatctgcctgcctcagcttcccaaagtgctgggattataggcatgagccactgtgcccggccaagaaaccttttctggaaagctccagaagacaccagctcagatcttagcaagaattgtcataccaaaatctaaagccatcagtgggaaagaaaatgaaggtactcaaagcctatgtaattctctctagagaatggaaaagggagtatagtctgctttcccttagcacagtgagggagactgatacatatcatgagatcttgccaggtggcagagatgagacagtatggcaggcagctttggacatggcttccaatgatctctgccctctggtattcatgctcttgtgtaatgctctccccttgactgtgggctggaccaagtgacttgcttctaactaaatttagcaaagatgatgggatctcacttctgttattaggttacaaatgactgacttgttggtattctccactgcatgatcagcttgcaagctttgattgacaagctgccattttggagaggcccatgtggcagagaactggaggaggtctcagaccaacagacgggtcctcagtccagcagcccacaaaaaactgaatgctgccaattacatgagtttgcttggaagcagagccttccctagtcaagccttcagatgatacacccccagctgacatcttgatgttagccttgtgagaaaccctaaagaggagtcagctagctgcaccaaagttcctgacctatagagactgtgaaatagtgactattgttttaagccactaggttttgagtaatttgttacacagcaataggtaactaatacagatggcttctgcaatagcagtaatacagtgccgcctaagattctgggagctgtggctttcccacatttgttgcccataactctcttgtgaattctctggtgatttttcttaaaagggggtgtctatagctgaaggctttcccattttcactgcatttgtaatgcctttttcccataggtactttatatagctttctcacataggagaggtgactgaagaccatcccacattccttagatgcaggggttttctctactgtgaattttttggttatagataagaatcgatttcttcttgagggtctttcttcataccaagtatttaaagatctctcttcagtgtgggttcttaggtggttgaagagggcaaaagtcttcatgtcttcccatagccactgctcttgaagggcttctccctatcatggcctgcccggtgttatctgatgttagagctgtgtggcagcatcttctcactcagctcttcttcatggcttccctgtgccatgagtactctggtgatggagaaaggaaggcctttccacattctcttttgagcttctcattattctggtactccagtgctggaagggggtagttaccctggaaagccttcacaaatgcctggcccttgagtcctctcacttatgaattttgctgtgcatgaactgaaaagtgctcttactgtgagccatgtcacatctgaaaaggtggtcttcaccataaatggtctactgttggtgaaggtttgatccactcccttgtgtggggtttctacctggagtacactgcctaacgttcagccaggagtacaatctttggcagggcaagggtgccatggtcagggtgaggaacgaccagtcatggagtactggtcctgtcacatatcccactactgagcctgttaggtgacattcacataggcagggagaacagagagggatctaggacagatgtggaagcagcagtggctactgaaactgctgttcagtgatgtgagcccaggccacccttcttttctagagatggggccttgctatgttgccctggatggactcaacctcctgggctcaagagatcctcctgcctcagcctctcaagcagctaggactataggtgtgcaccactgcacctggccaggcctctcctttatggggactcctgttcacatcccagccaatgctctcatgagtacttccttgtatgggggaggtcaaagaaacagcagcagctcacatgtgatgatgctgaaattacatggtaaataagctttttaaaataggtgccggccaggtgcggtggctcatgcatgtaatcccagcactttgggagtccaaggcaggcagatcaggaggtcaggagatcgagaccatcctggctaacatggtgaaaacccgtctctactaaaaatacaaaaaaattagctgggtgtggtggcgggcaactgtagttccagctactcgggaggctgaggcaggagaatggcgtgagccatttaggaggtggagcttgccgtgagccaaaatcgcgccactgcactccagcttgggcgacagagcaagactccatatcaaaaaaaaaaggtgccaaacaccatattctacaaggttctggatctctagctccttctaaaataccagctctgtcaactgtgttaaatgcccccatctgcctgtgcccactctgttggccagcaagactgtgaaggcatgaagtgtgtgttagtgaccagaaaccctggccagactgcaaaaaccactttcctggacgtcaggctatcacttctctcagctcccagttcctacctggggagtgatgggtgccaagatacagtttgagagaggtgaagtgaatgtacatgacattgcatttatctgctttaactgtggcaaaaactttaacatggcaaatacaaaggtctgtagctctggagttgttctgcacaccctcaccctgcacagtcccagttgatggggaactatggctattcctttgtccatgatggcatgtgccctagttcaccagtctacccaaatccctggttattacctcacatccagtgtttctctatgcacatagagtcctccatggacccctctaggtctttgccttggtgaccctgtgactattttagtgttgtagatgagtttatttttcctctgggtaagctctgggccctacggtaactgaaacaggccactatgttcaatccagagcctttcagtctttcccagtctttcacacagcaatgcaaagtaggctacaacaggacagagcaactacccgctcttctactgtgcccttaggcagattttgtgcccccaaaaggcactccccaatctatccattcattttctcaacctaccccaacagaacccctaagattaaaggtgacctgatcaataaggtctttattatcaccagttagtgcaggcaaggtaggtgattccagtggagggtgatttgtggcctcaatggacacatcttaggggttaaacacagacttgaccacatccacaaggaatgtgcatcttcctgagctcaaattagatttccctcaaggcccctcaaccagcatcggttcagctgagcacagtcctgaatccctagagaacacaggaaggaaggctcagggtactgttttccccatgcatgaggacaggactgctgcaaatttttggatccaggcaagatggaaagtgactatggcttctgccttatgctgcatgggtgagatggccctgcaaaggttcctgggctggtcagaaacagagtagcttctgaaggcttttccacattagcagtacatgtaggtaatttttctggtatggggattctgctgcatgaagtttgacttggctgaagattttctcacaaagaccacttccataaggctccactcaggtatgaatctttttatgctgtgcaaggttacaaagatggctgaagagtttcccacactggctacactcataagtcctttctctggtgtgaactttctggtgccgaacaagtgtagatctttcactaaaggcttttccacactggatgcactcatagggcctttcttgtgtgtgaactctctgatgacgaaccaggtgggagttactgctaaaggctctcccacattcactgcattcgtaaggcctttctccagtgtgaactctccagtgacaaataaggctggattttcggctaaagaatttcccacattcactgcatttataaggcttttctccagtatgaactttctgatgcttaatgagaatggagttttggctaaagaatttcccacattcattgcactcataaggcctttcttttgtgtgaactctccagtgttcaatgagagtggagctgtgagcaaaggctttcccacactcactacactcgtaaggcttttctccagtgtgaattctccagtgctgaatcaggctggagctgcggctgaaggatttcctacattcgctgcactcataaggcctttgcccagtatgtactttctggtgctggatgagggtggagctattactgaaggctttaccacaatcacagcattcaaaaggccgttctccagtgtgaactttctgatgtcgaaggagatgggagctttggctgaagtctcttccacattcactgcactcaaaaggccgttctccggtgtgaactttctggtgctgagcaaggttggagttattgttaaaagctcttccacattcactgcattcatacggtctttctccagtgtgaactctccagtgctgaatgagagcagagcttcggctgaaggatttaccacattgactgcactcataaggtcttacctgtgtgtgaactttctgatgccgaaggaaattggagctttggctgaaggctcttccacatttcaggcactcaaaaggcctttctccagtgtgaactttctcatgccgaatgaggtgtgatctgttactgaaggctttcccacattcatcacactcataaggtctttctcctgagtgaattctctgatgatgaacaaatgtgagtttgtggttgaaggttttcccacatgcaatgcactcataatattttacttcagtgtgaaatttctggtgcttcctcagcttagatgagtgactaaaggccttcccacactccttacacacatggggtatttccccagtgtgaaactttttattaccaaggattgatttctcctctaagaaatttccacctgttgggcatgtaaatggtatctcttcagagtgagttctcagatggttggggagagtggagctcttcaggaaggcttttccacagttgctgcactcgaagagtttctgtgtggtacagacttctggaagctgcccaagattggaatatggcttctgcccactgtcaacagcttgaagctggaggaggtcacagctgcccaggatgaccttcccaccttccctgcaagtgaaggggttctctgacaggtggactttagagctcttcataagtgcgtccctgtccttgtaccatctaaagggcttccctccactgtgctccttctggtgctggtgaaggtttgcattcaaccaaaagtctctcccacatgctccacatgtgtagggtttctcctcagactgtgttccctgatgctcagccaggtgcaaaatgtctttcaagaatggcccacacatgtcacaggagttagctttcttggtggaaggatctgcattagggatcctgacctgtaacacttctacagaaacattctgcttgggatgggccccctcaccctctactccatgccaagaacctgaaagtagagaaatgccagttaactaagaattccacttggtgggaatggttgacttcattagaaatgttacccaggaattcacacccaagaagaggtcccagggattgctgacaggccaacagggccatcatcagggtgaagaagggcccattactattggcaggatagggaccagccaagcaacagaataagggagacctcaccaggggtaaggacacagaaatgggtcaaaggacttaaatagacatttctctaaaagaagatatatacacaaatggccaataagcatatgaaaagaagttcagcatccttaaacatgaggagtatgaaaaccaaaaccataatgagataccacttcacatccactagcatagctataataaaaaaaaataaatgacaacaaatgaagtagaaaaactggagcacttatacactgcagacagggatgtaaaatggtgcagccaatttggaaaacagtttggcaagtctgcttctacagagctacacaagagaactaaaaacatccacacaaaaatgtgtacaggactgttcatagcagaatttttttaaaatttgagatggggtcttgctatgttgcccaggttggtctcaaactcctgggctcaagtgatcctcctgcctcagcctcctgagtagacggattataggcaccttgcccagcttctatagcagcatttttttctaacacctaaaaaatggaaacaagccaaatgctcatccactggtaaatggataaacaaactgtagtctttctatacactggaatatttggctataaaaaagaatgaaatattgatacatgctacaacattgatgaacttcaaaaacatgctaagagaaagccagtcacagaaaaatacatagtattctataaaatgtctaggaaacgtaaatctatatagtcagaaagtagattagtggttgcctaggaccggggggaaagggataagggaacatggggagtgacagctaatgggactgctaataggacctacagtttctctttaggtgatgaaaacatgctaaaattacattatagcaatgattataccatgtgaaaacatatagaaatcactagactgtgtactttaaaaggtgaattgtatggtttatcttaataaagctgtttttaaaaaatatctcactgggggctgggcgtggtggctcacgcctgtaatcccagcactttgggaggctgaggtgggtggatcacgaggtcaggagattgagaccatcctggctaacatggtgaaaccccctctctactgaaaatacaaaaaaaattagctgggtgtggtggcaggcacctgtagtcccagctacttgggaggctgaggcaggagaatggcgtgaacctgggaggcagagcttgcagtaagctgagatcacgccactgcactccagcctgggggacagagcaagactccatctcaaaaaaaaaaaaaaaaaaaaaaaaaggaaaaaaaaatctcattgggaaagagacagaatctgggcatgacctcatactgggtaacccgaccagggattggtgaatctcagtgggatctgttaggcagactggaggtgtctgatccccaacctttgcctccacaaggctcctgggcaacagctattaggaaagctcatgaggctgctcagagagagacaggggaagtacacacagcagaacctcagcaccccagcacctacaacaggaaacccgagaaggaagcagtacccatgatctggctttgggatgaacagagctttctatggggaaaagacacaaggcataaggtagtcatcaccatgctgagacagggcattaccaagtgaggtcacaagctcaaggttttccagcatcacactgtggtacaggtgcctctgggctgcatcaaggagctcccactcctcttgggagaagtatacagccacatcttcaaaggttaccatgctcttcaatgtggggacagctgagccacagggccaagaagtatgctgacaaagaaacaaacaattggtcaaatggaaatatgcaggaccttgctgtgtgactcagaatcctgatacatctaccactaatatctctttttcttatgatcctctcagtccacccactactcacccatccacagcttatcttcttcctcagggcccccacctaacatgccctggaattaatggtgcccctctctcctagtagtcccactggtcactgtatccaggccaacccaacctagaggaacaataggcaggtgggcagatggatgcttcctcctccctcctgctggccaattttccttgtgtcttctggctcatacctcccaaacataagaaaatttgggcttccctttcttaagcctcttgtaccagggccatgggcccaatggttcacattctctcacctttacatgtcactcctcagaccatacagttcttatatttccaacccctccctgttcacactgtaggcattctccctagcatctcaccatgcacatggcatacctgacagatgcaaccgggatccattcctggtccaagccagctacagagctccaaaaaccccactgcaagaggcagtcatagcccctcaagtcaatgcctcccctgccagccctgttccttcaaccatcagctgcccagaaccataagcagatctcaaatatctcttccctctgatatctttgcctttgtatgtgttgtctcctccccagtcatagctgtccttgctcttcctaacactcaaatccaagatccactggcccccaccttggcttggggactcagcttaggctgaccctttctgatcttgccactccaccagcctgacaaaaaccccaggaccctatttaagaagagataacatgccctgaccacaagaaggatggccgcaacaatgtagtgagctgtagagaagcaaatcaacctaaaccaaagcccaactctcatcctacttttgccgctatgcttcactgttgtcctagacctactctctgctcaggaggctcagccactatcttgaacccaacccacaactgcatgcagtgtccacacacaagcatccatcccttggatgtttccagcctaaacccgacataatttcataatcacatgtttagtggtctacttggcacctcaatttggtagtgtctgggacatctcaaatacaacatggccaaaatccaactctttatcttccccctgaaatctactcctcacaccaacttccacatctgaaagatctaaggtcaatttttttttttttttttttgagacagagtctcgctctgtcacccaggttggagtgcagtggcgcgatcttggctcactgcaagctccgcctcccgggttcaagccattctcctgcctcagcctcccgagtagctgggactacaggcacccaccaccacgcctgactaattttttgtatttttagtagagatggggtttcaccgtgttagccaggatggtctcaatctcctgacctagtgatccacctgcctcggcctcccaaagtgctgggattacaggcgtgagccaccacgcccggcaatttttttttttttttaagacagagtctcgctctgtcactcaggctggagcgcagtggcacgatctcagctcaatgcaacctccatctcccagattcaaacagttcttctgcctcagtttcccaagttgctgggattacaggtgcacactaccatgtcctggctaatttttctgtatttttagtagaggtggggtttcgccacgttggccaggctggtcttgaactcctgacctcaagtgatctggccgccttggcctcccaaagtgctgggattacaagtgtgagccactgcactcagccttaggtcaatcttaacatttcactttctttcactgtcccacatcaggtaatccatggcccagtttgggcagattcagaagccaaccatctgtcctacctccacgggcacccctctgtccagctacccaaagcacacatctggaccacatctgtcagctcctcactggccttcctgctccaccatcaccatccctccagtctgctgcccactaggcatccatagggcgtctgttaagactggagtcagagcacctacttcctctactccaaaccttccatggctcccaccaccatcagaatagaggtccagctcctcaggctgccattccaggcctaactattggtttcccttccctgtttccaccagactaaatggagaccggcagtccccagaatgcttccatttcatcaccactaaacaaggtacacatgctggtcactgtccctgggacagccttccagatctcattccacaggattccagaaatgggaatccctcgatataaccccttgcctggattcaggatggtaagggtaagtgactcccagggcagggcccaggacccacgtgtgaggacaggacacgatcaagagtcccaggacaccaacatcccctctatctgggcttcaggatcctgagggccggaatcccagcgggtgagggcctggggcacactccacttacctgcgccgggcccatcagcaacgctggcaaccccattagaacctgtgggctgggcagggccataacaggaggcccagggctagccctgccgctgggccgaaccctcacacttccgctgggtgacggtcgcactcaggacctgtcttcccaaatgcaaaatgcgcgcaaggcctctgggcaccgcagggacgaaggctgggtatggagaccctggagacgcgtggcgctggctccactttcgggaacaccttggctcataaaagcagagtaattagccgggcactatggtgcgtgtgaaggcgcggtgacggtccctgcacccactcccgtgccctggtgtggctccagaggcctgctgtagcccaacccaccagcagcaaaatgaggaccgcaatggcggcgccggaagtcccgcctctcaatgacagctcggacttgccactggtccgagctttcattggctcaaggatccccgccgtctatgacgctatttccctatgcccgtcacgctactgctaggtcgttgccaaggtgattgaggaatggcgtttattgcgtcgctgctcaggcaacgcaaactacattatccagaaggaccctcgcggtgcctcagggctggccattggcagccgaggagacaggcacttccgggcggagtgtaagacgctggccaatcacagcctggcagcgggacttccgtcgtcgtcctcggaccatcactttggcatttctcgattttgtctgcttctgaagggaccgcgttgtcaggcgagggacggaatcttggaggctccctgggcccatggaaacaggagcgaggaaggcacgagagtcggggaagttccgccttcttgacatacaagcgcccccaccgcggcgaatatcgcccctgagcccagtgttcgccccccacaacaccgcaccccccttccccaccctgtgccttagataaagccggcccagtgggaccctcaggttgcaccgcgcggaggtgtccgcggctctcgggagtcgtcgcccttggcgttatgttggctttagggagcgcgaggccgaggccaagaaaagctacgcattgggaggtcttgacccagtgtgcgcccggctgtaggcatggaacgtgcgccaaaggtctcctggcacccactccgctggactcagcaccattgtcctaagtctccgattgagaagtatctgccccaggtcctctgcgggccccactgaacagtgtggagcgttcacaggttgggggtcaccatttcagaatccagtttgttgagacgtggagggtacaggaggagggatctgcatatgcgaagacttggacttgaccctgacctgagcgttcaggcaggctctcatgcccccttggcagcgagtggagagcgtaagaggagtcctgcctctcctggcacaccgagggcgcctgggagccatgaaaggtgttgaacagaaaagggatggacatgacctgagttagaatttggaaagtatttcagtggttgctgaatgaacacactactggagaaggtggttgtagtggggctggaagcagggagactgtgggggaggttattgcagtattgttccagacagttatgatagtggcctgtccagaacggaagcaagaaggatgggagaagtgatcagattcccagtggatcttcaagatagagctaatggaattttttgctaccttagataagtggaataagcatgagtaggggtgaaggaccatcccaagtagttaggaagaattaggatgcctcctgtggagaatagaggttggcagttggcaggaggaggatgtttcatggaagattagcgatggattttgtaggtatagagtctgaattgtctggagacctgtgagtggaggtgtcaaatgggcctctggatatatagaattctggtgtggcttcaggacgtccagactgcattatgttggtggcctggcccagtgaacggcctgaggataggatttgggaaggagggttttaggttggaggaccagtggctagggctcacgctcagtgcttagatcacatctgtctgcccattggcttggtgttgcagggcttaatgacctttgaggacagggtcagtacatcttccaagaatgtggggctccttagtgaggtccaagggggcttctacagtgacatgatactacagagctttgtactccagtgcccactaggtaaggctactgtgtctcctctttcccctacacatgaaatctaggttttcctccgcctttccattgttccctctgggaggtgctgctggccctggcactggccagtgtcctgctgtgtccggaattgtttccttcctctgggttcttggtctcgctgacttcaagaataaagccgcggaccctcgtgttgagtgttacagttcttttttttttttttttttgagacggagtctcgctctgtcgcccaggccggactgcggactgcagtggcgcaatctcggctcactgcaagctccgcttcccgggttcacgccattctcctgcctcagcctcccgagcagctgggactacaggcgcccgccaccgcacccggctaattttttttttttgtatttttagtagagacggggtttcaccttgttagccaggatggtctcgatctcctgacctcatgatccacccgcctcggcctcccaaagtgctgggattacaggcgtgagccaccgcgcccggccctgttacagttcttaaagatggtgtgtccggagtttgttccttcagatgttcagatgtgtctggagttttttccttctggtgggttcgtggtcttgctgacttcaggagtgaagctgcagaccttcgcagtgagtgttacagctcttaaaggtggcacatccagagttgttcattcctcctggtgggttcgtggtctcgctgacctcaggagtgaagctgcagacctttgcaatgagtgttacagctcgtaaaggtggcgtgtccaatgttgtttgttcctcccagtgggtttgtggtctcgctggcttcaggagtgaagctgcagacctttgtggtgagtgttatagctcataaaggtagtgtggacccaaagagtgagcagcagcaagatttattgcgaagagcaaaagaataaagcttctacagcatggaagaggacccgcgggttgccgctgctggcttgggtggccagcttttattctatttggccctgcccacatcctgctgattggtccattatacagagcactgattggtccattttacagagcactgattggtccattttacagagcactgattggtccatttttacagagtgctgattggtgagtttacaaacctatagctagacacagagtgctgattggtgcatttacaatcctttagctagacagaaaagttttccaagtccccagccaattagctagacacagagcgctgattggtgcgtttactaacctttagggagacacagagcgctgattggtgcatttttacagagtgctgattggtgcgtttacaaacctttagctagacacagagcgctgattggtgtgttggcagtcctttagccggacagaaaagttccccaagtccccactggacccagaagcccagccggcttcacttttcactgctacttatccctggctgctgcataaacaacccccacaccttccctgggatcttgacaaccttgtgaagccacagtgatggtccctgcacccactcccacgcccttgtccagctctagaggcctcctgtagcccaacccacaagccacaaaatgaggaccatcatggcggtgccggaaatctcacccctcaatgcccacctggaatcggaagtctcaaaacctgtgtagcatatcacatgcagctgggtcgtttcctggctaggttaccctgtcaggatctgtgacttttctgtcctttctgccacattccctcactctagtaggagttttctgccagctgtcccttgtgagtcccagtgggcactgacatggtcattgattgtggggtcactgagcattgactttgtgaagttcagttctttccagctatatacctgcataggtgatcttcacctacggtgatttgtcatggggtggatcaccttgacgtgggctgccttctcacaaaccacttgatgagagctgtataggatcactgccaccacccccgccatgtgatcacctaactagaacaaatgaagagacctggctggtggacagggtggcttgaattaggccatggacagagaggccccatggtgcaccagttctgttgagtggaagacagctgtggcagagctgttggcagtgccctggtggctcacctggtacctgagttgtgccctctgttgtcctggcaccaggatgtatagctgtgccttttaaaaaaaattttcctgaccttcttctgacactctatcctactttgccctgactcctgttccctggatggcttcctctctgtcttccaagattcactctttccccttctcccgtcctcccctccagtggccaggtcttctaccattggcctccctttaatgtgtcttgaacggataatgtatctttaaatagttgttatctgcacatggtggctcataactacagtcccaactacttgggatgctgaggcaggaggagcgcttgagaccaggagtttgagtccagcttgggcaacataacgagatcctatctctaaaataaataaataaatacatagatacctaaatagtttttgaaaacctcttcttccgtgagactggcttgttccatttgaggagtatgggcataggtgtcaatggttcaagacctggacttcgctcactgcatggtactgacctgtcaccagacactagggccctgcagctccacattttgcagaacctacagagaactgacactgaagagatagctgataaatacacagcatatggaaaggtgtttgaggggaagcaagccttttctcctaccaaaaaacttcacagtggaaaaaattgcaagtgtattatgagcatgggaaggccttcacttttgtcttcatcctgagaaagcaggagtacatgcacatcttcaaaggcccttacaagtatagtaacatggggaatcctccagccagaactctacctcctttgagcaccaatatgttcaccccagagaaagtccccataagcgcaaggagtgtggtccagccatgagcaaaattttgcaaaactctcctctgtatcaaaatggtcataccctaatgaaggactcctaagttcagggaatgtggggcactgccagctgtcctggtggcttccctggtacctgacttgaggttcatacatgttatattcagagttctgctttcattagcaaaaacaaattaacaccggaaaatggttgtacaaatgcaataactacatgaaagctttcagtgaaatatgaaacctcatcctgcagaattctcatcagagaggcccagtgcatgcagctaatgttggaaagcctattctcaattttaatcctatttagcaccagcaatttacagcattgtgagtgtagcatgtaggagagcaaaaaattgcagctcctgccttgatgtgcacaaagtgattcacactggaaaaaccctctatgagtgcagccagcatgggagagcatcggccacagctcctgccttgcttggcaccagaaacttcaccctggagaaaagccttttgattatagtaaatgtaggaaagtcttcacctcccttatttagtataaaagaattcacactggccaggtgtggtggctcatgcctgtaatcccagcactttgggaggctaaggcagggggatcacctgaggtcaggagtttgagaccaacctggctaacatggcaaaccccctctttacaaaaaatacaaaaatcagctgggcatggtaacgcccatctgtaatcccagctacaccagaggctgaggcaggagaattgcttgacctcagggggcagaggttgcagtgagctgagttagagccactgcaccccagactgggtgacagagcaagaccctgtctccctcaccaaaaacaaacaaacaaacaaacaaaaaacacagctgggtgcagtggctcacgcctgtaatcccagcactttgggaggccgaggcaggcagatcatttgaggtcaggagtttgagaccagcctggccaacatgatgaaaccctgtctctactaaaaacagaaaaattagccgggcatggtggcaggcacctgtaatcccagttactcaggaggctgaggcaggagaatcacttgatcctggaaggcggagattgcagtgagccaagatcatgccactgcactccaacctgggcaacagagtgaaactccatctcaaaaaacaaacaaacaaaacaaaacccagccctacatgagtagccttcagccacagctaaaccttgtgtagaaggattcctccctgaggagacactccatgatggccctgcatgtggagaagctgacagaacccatgttgtaccatgatcgccctgcatgtggagaagctgacagaacccatgttgtactttgcaacccgctgagggaccttggcagagctatcacaccactgggtcctgtggtggaagcccatctctgttttatggtgacttcccagttgctcaatgtaagtcactccctgtttcctgtttatactaccttggagggatggtaggggccttgcacacattggggtggtatcatgctcactcatgatggggtttgacatggacatgaccccattccaagcaaggagcctgattggataatttctttctcttttttttttttttttttttttgagatggagtctttctctgtcaccaggctggagtgcagtggtgcgatctcagctcactgcaacctccgcctcccgggttcaagagattcccctgcctcagcctcccaagtagctggaattacagccacacaccacctcgcccggctaattttttgtattttagtagagacagggtttcaccatgttggccaagatggtctcgatctcctgacctcgtgatccccccacctcggcctcccaaagtgctgggattacaggcatgagccactgcacccgacctctctccttttgtcttttcttttttcttttcttttcttctttcctttcctttcctttgctttcctttccttttctttcttttctcgtcctttcttttcttttctctctttcttttttttgaggcagagtctcactctggtgctcaggctggagtgcagtggcatgatctcagctcactgcaacctctgcctcccggtttcaagcaattcttctgtctcagcctcccaaatagctggacttacaggcgtgtgccaccatgcctggctaatttttgtatttttactagagacggagtttcaccatatattggccaggctggtctcaaactcctgacctcaagtgatctgcctgcctcggcctcccaaagtgctgggattactggcgtgagccaccatgcctggccgacaatgcaggagcttaaccaaaggaccacgttggctagggtcaatcagctgccccaggtgaccacccttagtgctaatcctgtgcagggtaggggtctgagccaaaaagaggaggctcttgtgtgtacagaaggcaatttgttgctatttttatttcatgcccaattcattaagaatgtttcaaacaattagcatttttctaagtattaagtaattaacatttgcctgaagaattacacattagatggataatgtaaaaataaagtgtttaagaagttaaacgtctccaaacattaaacattacttgagattggacatgatgggtcatgactgtaatcctagcagtttgggaggctgaggcaggtggattgcttgagtacaggagttcgagaccaacctgagaaacatggtgaaacctcgtttctacaaaaaaagtaaataaaattagccaggtgatatggtttggctgtgtccccacccaaatctcatcttgaattgtaactctcataattcccacacgttgtgggagggacccagtgggagataagtgagtcatgggggcagtttccccacactgttctcgtggtagtgaataagtctcaagagacctgatggttttataaggggtttcctcttttgcttggctctcatttgctcttacctgccaccatgtaagacagggctttcaccttctgccatgattgtgaggcctcccagccacatggaactgtgagtccattaaacctctttgtcttcataaattacccagtctcaagtatgtccttatcagcaatgtgaaaacagatgaatatagtaaattggtagagtggggtactgctataaagatacccgaaaatgtggaggcaactttggaattgggtaacaggcagaggttggaacagtttggaagcctcagaaggagataggaaaatgtgggaatgtttggaacttcctagagacttgttgaatggctttgaccaaaatgctgataatgatatgggcaatgaactccaggctgaggtagtctcaaatggagatgaagttgttgggaactggagtaaaggtgatgcttgctatgttttagcaaagagactggtggcattttgcccctgctgtagagatttgtggaactttggatttgagggagatgacttaaagtatctggtccgggtgcagtggctcacgcctgtaatcccagcactttgggaggctgaggcaggtggatcatgaggtcaggagatcaagaccatcctggctaacatggtgaaaccccgtctctactaaaaaaatacaaagaaattagcctggcatgatggcgggtgcctgtagtcccagctactcaggaggctgaggcaggagactggcatgaacctaggaggcggagcttgcagtgagccaagattgcaacactgccctgcagcctgggtgacagagcaagactccatctcaaaaaaaataaaaataaaaataaagtatctggtggaagaaatttctaagcagcaaagcattcaagaggtgactttgatattattaaaagcattcagttttaaaagggaaatacagcataaaagttcagaaaatttgcagcctgaccatgcaacagaaaagaaaaacacattttctgtggagaaattcaagaaatttgcataagtaaccaggagtcaaatgttaatcgcccggacaatggggaaaatatctccaggacatgtcagagacctttgtggcagcccttcccatcacaggcccagaggcctaggaggaaaaaatggtttcgtgggctccccctgctgtgtgcagcctacagacttggtgccctgcatcccagctgcttgaactatggctaaaaggagccaaggtacagcttaggctgtggcttcagagggtgcaagcctcaagccttggcagctcccatgtggtgttgagcctgtgggtgcacagaactcaagaactgaggtttgggaacctccacctagatttcagaagatgtatggaaatgcccagatttggagcaggcaaaagtttgctgcaggggcagggccctcatggagaacctctggtagggcagtgctgaagggaaatgtggggttgaagaccccacactgagtccccactggggtactgcctagtggagctgtgagaagggggccaccatcctccagactccagaatggtagatacaaccaacagcttggaccacgcacccggaaaagtcacagacactcaacaccagcccatgaaagcagctgggagggaggctgtaccctgcaaagccacagagctgcagctgcccaagaccatgggaacccactgcttgtatcagtgtgacctggatgtgagacatggagtcagaggagattattttggaactttaagattcgactgtcctgctgcatttcagactttcgtggggcctttagcccctttcttttggccaatttctcccatttggaatgggtgtatttatccaacggctgtaccccaattgtatctaggaagtgactaacttgcttttgattttacaggctcataggaagaagggaattgccttgtctcagatgagattttggactgtggacttttgagctaatgctgaaataagtagactttgggggactgttgggaaggcacgattggttctgaaatgtgagcacgagatttgggaggggcgaggaacagaatgatatggtttggctgtgtccccaaccaaatctcattttgaattgtagctttcataattcccacatgttgtggaaggggccccagttagaggtaactgagtcatggggacagtttcccccatactattcttgtggtagtgagtaagtctcacgagatctgatggtttcataaggggtttcctcttttgcttgactctcatttgctcttgcctgctgccatgtaagacgtgcctttcaccttctgtcatgattgtgaggcctctccagccacgtggaactatgagtccactaaacctctttttctttataaattacccagtctcagatatgtctttatcagcaacgtgaaaacagactaatacaccaggcatcgtggctcctgcctgtagttccagctacttgggaggctgaagttggaggactgtttgagcatgggaggcggaggttgcagtgacccgagtatgcaccactgcactccatcctgggtaagagagtgagaccctgtctcaaaaaaaaaaaaaaaaaagtaaaaaaaaattgcttgaaatgttaataatgcctctaagcatttgattaaatcacaatagtacttaagtgttcttaaattctttcaaagcaggaaaaatttaaataaaaacattcaaaaattgtcgagctatcttacactatagggatctacaagtagaatcaattctgtggacagttatagctgacagtagacagatatttatagatggaggtgggtatagaggaagacaaaatgaattaacgtacttgacatctgagaactgtctaaggatcctaaaaacaagaccctcacagggaagcaacaaagagagaatcgtttattctctgccaacaacatggtcagtctacattgagactgccctgccttttgttgttatgtgtcaaagacacttagattggtccagagaaaaaaggaacaaagcatccatgttgtgatgtgtggggcaaagcaagaactagatggtctaaggacaagcaaggctggggaattaccttctgctcgtccaagttacaaggaaaacaagttttgggcgagcgtccaagaacaatcacagaatcaagacaaatgacaagcgggtagtgtcattacaggctgagaattcttggtgtagaggttgaaaaacggaccttaaacctttacgggacactgacacacagagagatcaaaccctcgcccaggatgcacagtcagtgagatgcaaagctgggaagggaacccggagctccaggcatctgctcctccacctacacctgccctacccggtgcgttttctcctccctgctacctgctggtgttgccttctggaacctccgcagtttctgctttcacacctgcagggtttagtctccagggctgcttaggtgggtgccaggaactgggaatccccaacgcgggacaacctgccgggcgactcaaccagtgccacggagcccttggaaacccgcggcagctgcgctactccatttccaggcgcccagcgcggcggcgcttagccgttgccatggagactggtaatggccccgcctccgcgccgaaaaacaggcaggaaccacataacccagaaggctgtgcgcaagcgtctgcgcgcgtattggggcaatgtgagctctgggggctggacttccggcgttgggactgtcacttggctgctcgcgtcaggccacaccggtggtctgggctgtggcgcgcgggtcggggcccgaggcgggcggccaggaaggtacggaccacgagcagccggccgcgcccccaagcctcggtatcttcgagtatgacgtggtcggcccgggggcggtcgggccccggcgggaaccacgcgttctcccgccccgcggaagcccaggaggcagcgcattgggcattctgcgcccatgactgccgggcaggctgaggcgcggggcagccgcgggaggctgctggcggggatggcggtcccgggtggtccatgcctttcttccctcccagttgcgggttccgctggcggcggtggcgctgacaagcccgcgccgggggggcgggggagtccctgctcacacagactgcgcccccacggagtgaggccgcttcctagacctcgcctagtcgtctttcctctccctgccctgggggggttgcgggggtcagtgcaaactcctgcgtccagggcactggtgagctcccgacttccggcagccagggggctgaggtcccgaaggaggctccgaggggagagtcctgcgtgtgcaaaacctgggaggggagccgaagcccagatgcttctgggactgagcgctctcgatgtggagctggagtagaggggatgtgtgcggctgcagtagcaggcgagggagtgggctttatctcgagggcgtcgggagacatagaagttttgaacagaatcaggacatcctctgagttgggactttaaaacggttccaccgtttgttgcgtggagaacagacatgcaggggtgtcggcatgaagggaagaaccgactgccacagtctgggcagcagtggaggtgggcgaccaggtgaattctggtggatctgcggatgcatcaggtgtgggctgtttgaagaactaagtaccccatgttgttcagcctgagcgcctggaagaagagagctgctgtagatagaaaggagaattgaaaggaaagcaggtttccttcaggggaaagatcaagagtctgggatgtcccaggttggtcatgtcactggacctgacgttgttggtgtcctgggctgaggacagggcctataaactggactgaagaaggcgatgagcagtcaggcgtgcggagttacagcttgagggtaaagaaaaccggctggggtgcctgaggctatcaggggaggagttcggcaggtggctgaataggagagggtggcagcaatgtgggaaagaaattgcgggagcgctgagatcgagaccatcctggctcacacagtgaaacccggtctctactaaaaatccaaaaaaattagccaggtgtggtggcgggaggctgaggcaggagaatggcgtgaacccgggagccggagcttgcagtgagccgagattgccccactgcactccagcctgggtgacggagtgagactccgtctccaaaataaaaataaataaataaataaataaataaataaataaataaataaataaattgaggagggggcgccatgtggagggaggaagggattgagttcccctgtgttcacaggttcttggggctgcacccctatgacgactggtggggatcatccagtccctcaggctggatgagcagcctggaaatgtcaggcaagcgcagcaggggaaggtctcagtgatgggcatgcctggggggtccacagctgggacttacacccttgcttattacaaaagcaagaagggcacatctggggagggtcatgaatggtcatgctgagtcacgagtggatatttggggctgcccttggtgtggcagctaagggcccagccagggcttgctctagcctgcttgtgtaggggtggccagtggggaagtcaagaagccatctggggcctggaccaggagggcagaggggaggggtcccagacaggtgagggaagtgccacctgaagataatctcggggtggaacccaaggaaggagggacactgggggaggtgactgttgggatggggagcttggtcctggctcacagccataccttagaccatgcctacctccacctccctgctgttttaggacctgatgaccttcgaggatgtggccgtgtacttctcccaggaggagtgggggctcctggacacagcgcagagggccctgtaccgccacgtgatgctggaaaacttcacacttgtgacctcacttggtaaggccctgggtgctccatgaaaagtgcacttggtgacaatcaggactgcctcttcacttccctcctggttgatgagcaggatcaaatctggccagggccacgtggaacaagggtctggtcctgtagacacaaagtttggttgggtcagccactccttgccgccctgtccagctgtggcctctctcatgcctgggctcagtcccgttgctttggtgctctgggcacagttgctgctctggggacacatgagctattcctatgagccccttgccctgtgctatctttagattctcccagttgcacagattactgtctatttccatgaagccctgactcctgctctctgttgggaggtgggttgtcttgacctggggctgggctctcacctgctcctcctcacaggactctctacctcccgacctcgtgtggtcattcaacttgagcgtggcgaggagccctgggttcccagtggaaaggacatgaccctggccaggaacacctacgggaggctcaactctggtgagtgggagctcaggtggggtgaactaaggaccaacctgtggccaagcccatgtccctgcttttctgactctggaaacacatcctcctctcctgcctcctacctgactcccttctcttccatcatcagcctctcctggaggctgctgccttagtaggtgcccttgaagggagagctccaagggcacaggagctgggttcacacagaagggcctaccttcagctgggctgtgtggccttgaaccctccacaactagcagccattattgataggtatttatttcgcccatcatttatctttgtattcatcaaatgtttcctgagggcttgtgggcattgtagacacagccttgaccaggacactcatggtcctgcctttgtggggctgatggtgctaggggagacgcagtgagtacgtaggattcaggagtgcagtcttgagcattggttggaggtcattgcaagagcaggtttgggagtgggtgcccaagacggggcaccaggggagaagggagtgagctatggaaagggagggggtggaacagccagtgtggagacgtgggtggcacgcagcagctgctgttttcctcagcttcacatcctgggtgtctgggggctgccgccttgatcatgggagtccccactgcagtcagtgccacacctgtcagggcagatgcttcctccaaaccccagcccctcctgcagagccagcctcacctcttctttttccctaagcttttgtcccggctcctgggctcccccttgcctgtccactcagcctgccctggtcctctcctaaccaggatgccccaggcaaccaccgtttctctgcgtttaggttcctggagtttgacagaggatagagatgtttctggagaatggccacgagctttcccagataccccacctgggatgactactagcgtcttcccagttgccgatgcctgccacagtgtaaaaagcctgcagcgacaaccgggtgcctccccatctcaggagagaaaacccacgggggtgtcggtgatctactgggagaggctcctgctaggctcgcgcagtgaccaggccagcatcagcctgcgactgacctccccactcaggccccccaagagcagccggcccagggaaaagaccttcacagagtaccgggtgcctgggaggcagcccaggacgcctgagcggcagaagccatgtgcacaggaggtccctgggagagccttcgggaatgcctcggacctgaaggccgccagtggtggcagggatcgcagaatgggcgcagcttggcaggagcctcatagactcctcggtggccaggagccctcgacctgggacgagctgggcgaggctcttcacgctggggagaagtccttcgaatgcagggcgtgcagcaaagtgttcgtgaagagctccgacctcctcaagcacctacgcacccacaccggggagcggccctacgagtgcacccagtgcggcaaggccttcagccagacgtcgcacttgacgcagcaccagcgcatccacagcggcgagacgccctacgcgtgccccgtgtgcggcaaggccttccggcatagctcctcgctggtgcggcaccagcgcatccacacggccgagaagtccttccgctgctccgagtgcggcaaggccttcagccacggctccaacctcagccagcaccgcaagatccacgcgggtgggcgtccttatgcttgcgcacagtgtggccgccgcttctgccgcaactcgcacctgatccagcacgagcgtacgcacacaggcgagaagcccttcgtatgcgcgctctgcggtgctgccttcagccagggctcctcgctctttttgcaccagcgcgtgcacacaggcgagaagcccttcgcctgcgcccagtgcggccgctcctttagccgcagctccaacctcacccagcaccagctcctgcacacgggcgagcggcccttccgctgcgtggactgtggcaagggtttcgccaagggcgccgtgctgctcagccaccggcgcattcacacgggcgagaagcccttcgtgtgcacgcagtgtggccgcgccttccgtgagcgccctgccctcttgcaccaccagaggatccacaccacagagaagaccaatgccgcagcaccagactgcaccccggggccaggtttccttcagggacatcatcggaaggtgcgccggggagggaagccaagcccagtcctgaagccagcgaaggtctgaggtcacaggtcgcagcccaaccctttcttggccttctgtgaatcccttccacagctaaagggtccgagtgctcttcagatccacgatggggaaaagctctgtgcctgagagtcagggacgagggagaccctttggctgtggttccatttgcaggtggggacaggatttgccagtttagtcatagctcacacctccatcctcaaagaggtaacactgcagaaacatcagagggaggacatgtcagctggaactctggtggggctgaggctgtagttggggccataggacgccgacaaaggcagcgctgcatggtggtgctacttcatgtgttatgagagtggatgctgaggtgagggggatgcggacatggggtaggatgacctagagaaacttatgatgtctgcacacaaactggccgctagacggacgctgaggacattttccccctgaggcctctattcaaggcttcctgggggccatctcagcaaacaggagactacaggggactggggatcagggtgtggcctgtgagtgtcagcctcctcctcggaaaaagaaaagctttgggtcaactcagcatcatgtttgcagatgctgacagacgggatcctaatgagagtcaatgtgtgctcactgccagctcctgggctgtgctctggtcagccaggtgtgagggcctggcctggggtcacacagctgactcaggagaggaatgcccatggttctcagcattggaaggacaaacctaggatgatggctttccagtggcactcgttcaggttttcgtccaagtctcagcttggccaaggcctgtcgctcactcatttacaaaagtcgatgtgaggaggagcctttacacctgtggagacagtgatagctttggagcagataaggtggagctgctcatttttgctggatttggtggccgatccccgcccccacccccaccccctccatctcacctttcccttgttatgcctcctcaattggaggctggacagagagctgaataggaaggacttgccattacctaaggccatgtgtgacagcctcctgaggacctccccaacccagtgtgatgggcctgcatggcagagacaaaagggtagactgggggtcatttgcttcctgtggccttaagcctactaggccccatccttacctgagacctcacctccaagaaattaatggtcttttcaatggagaaaaaaaaagactagtatttgcaacttcaaatagatgtagtttcctttacagccgtgtggacctccacagcacagcctcctgtctctattccagggtatgattcagttgtttgtttgtttttgagacagagtctcaaggcaactcttcttgcccaggctggagtgcaatggcacaatctcggctcaccgcaacctccgtctcccaggttcaagtgattctcctgcctcagtcttctgagtagctgggattacaggcgcccaccaccatgcccggctaattttgtatttttagtagagacagggtttctccatgttggtcaggctggtctcgaactcccaacctcaggtgatctgcccatcttggcctcccagagtgctgggattacaggcgtgagccactgcgtttgtttttcatgaagcgtctcagtctgtcgcccaggctggagtgcagtggagcaacctcggctctgcctcttgggttcaagccattctcctgcctcagcccctccagtagctgggattacaggcttgcaccaccatacctggctaatttttgtatttttagtagagacggggtttcaccatgttggctgggctggtctcaaactcctgacctcaagtgatcggcccatcttggcctcccaaagtggtgagattacaggcgtgagccactgcgcctgcctacataccatgattttaaagttgcagctgtttcctattgcttgtaactcagtcttgtcttttcaatggtaaccaatttctgtttcaaactgaaaggttcatgagggtgagttcttctattagtctgttttgtgtcactataaaggaacacctaaggctgggtaatttataaagaaaagaggattaattggctcatggttctgcaggatgtacagccatggcaccagcatctgcatggcttctggtgggacctcaggaagcttgcaatcatgatggaacatgaaggaagagctggcatatcacatggcaagacaggaagcaaggcgggggggaagtgtcacacatttttttttttttttttgaggagtctcgctctgttgtccaggctggagtgcagtggcacgatctcggctcattgcaacctccgcctcccgggttcacgccattctcctgcctcagcctcccgagtagctgggactacaggtgcccgccaccacgcccagctaatttttaatatttttagtagagacggggtttcaccgtgttagccaggatggtctcgatctcctgaccttgtgatccgcccgccttggcctcacagcagagtggtgggattataggcgtgagccaccgcgcccggcccacttttttttttttttttctgaaatggagttttgctcttgttgcccaggctggggtgcaatggcacgatctcagctcactgcaacctctgcctcctgggttcaagtgattctcctgcctcagcctcctgagtagctgggattacaggtgtgcaccaccatgtcagctaatttttgtataatatttttagcagagacagggttttgccatgttggccaggctagtctcaaattcctggcctcaagtgatccacccgcctcagcttcccaaagtgttgggattacaggtgtcagccaccgcacccagcccatcacacacttttaaacaaccaaatctttcatgaactcagagcaagagctcacttctcaccaagggggatggtggcaagctattcatgaggaatctgcccccatactatagtttggatgtttgtcccctccaaatctcatgttgaaatgtaatcctcaatgttggagatggggcctggtgagaggtgtttgggtcatgggggtggatcgctcttgaatctcttggtgctgtcctcaaggtagtgagttctcacaagatttggttatttaaaagtctgtggcacctccttcctttctctcttgctcctgctctcaccaggtgagatgcctcctccccctttaccttctgccatgattgtaagcttcttgagaacctagcaagaagcagattctgaagccatgctcgtacagccctcagaacagtgatccaattaaacctctcttctttataaattacacagcctcaggtatttctttatagtaatgcaggaatggcctaatatacctcatgatccaacacctcccactaggccccatgtccaacactggagatcacatttcaacatgagatttggaggagacacacatccaaaccatatcagttctcttgtccctgagtgaagaggcacttgctccctctaaacccaattctaggtgactagagatttatgaaggtgtcgggatgtttgttcatgatgcatagtggcctcatagggtctccctacttcttctgcaagaagaacaccttcaggggctttcagctcagccagaagattcacataaaggttgttcatctggtaccttgagcactctgccaacacaggtgatcacagattccaagacacataaaagagtgaatcacaactcactggtgactcattgaggagtgatgctcacaaagcaacacacttcgtctaaatacactgtactaaccttggtcacttttgaaaaggtatttctacaattatttgaaactgctcatgaaaactgagctttcccttaaggagcaacccccccacccttcgaaacctatggagatcctatttccaaaaacttaggtaaatggacccaggtcactcgagatgaccctaaaatgcagtggccaaaacggagatcttttgaaattcctaaagtaatatatttgtgtgcacaataggaaacttaatatgtttgttctaaaaccagacaaattggatgggaggcctactttctgtttgtgcaggctatactctgataagatatttgaaaggttttttaaaaagagctctataggccaggcacagtggctcatgcctgtaattccagcactttgggaggccaaggtgggcggatcacctgaggttgggagttcgagaccagcctgaccaacatggcgaaaccccatctctactgaaaaatacaaaaattagccaggcatggtggtgcgtgcctgtagtcccagctacttgggaggctgaggcaggagaatcacttgaacctgggaggcggaggttgcagtgagctatgaaactatagcaaactccagcctgggcgacagagtgagactccgtcacaaaagtaagtaaataaaatacaatgaattctatggtcagatgtcagcttaattaaaagctgatattcaggctttttttttttttttaagaaaaaatacctttctgctttttctcatttggagcctgtttctgggaattttttttttttctgttgactgaaacccctttttacatatgtttagtccctttgtttgcttcttttcttgttagtatgatgtaaagttttattggccttctgaaaaacttaaaatctccccaaattggcttagagctctcccattttcttctactttttcttcctttagctatctttgataccacataaagaaatctagaggagtcttctaatatctctgagaccctttgaggaacacagtaaagtgtcacatacaccttttatggagtcttctgtcttcctcatggaatcctaagtgtagcaggcagtttatcttaggtctaaagctctgatctcttttacactgagttctctgaccttttggcttggggggtaccaagggttactttgttctatgaaagaacatgatctttgggtgtgcactggctggcaagttactggcaagggctgcagttttggctgatagcagttgttttcagtgagtggttattactgcagggtgtactaattcctttgcatgtttaaataagaaaagtatggtttgaacacttggagacttatagaaacactcatcaccaagggggaagaatcctttgggagatgggctgatcacagatcacagagtgggctaattggtgctgggtgtcccaccagcatcagggaatgtccatgcagtgaggtgcactgtggaaacacagccctgtcctgtggtatttccatcttgtggggtcctcaagattccattttaaagtggaatccttgattttatttatttatttttattttttgagatggagtctcgctctgttgcccaggctggagtgcagtggcgtgatctcagctcactgcaaggtccacctcccgggttcacgccattctcctgcctcagcctcccgagtagctgggactacaggcgcccgccaccacccctggctaatttttttgtatttttagtagagacggggtttcaccatgttagccaggatggtctcgatctcctgacctcgtgatccgcccgcctcggcctcccaaagtgctgggattacaggcgtgagccactgcgcctggcctggaatccttgatttttaaagctctagatgttctgcctttcaactgtgccagttttttacatagatggggtttctctatgttggtcaggctggtctcaaactcctgacctcgtgatccgcctgcctcggcctcccaaagtgctgggataacaggcgtgagccaccgcacctggcctatgttgagttttaggccacaaaaaattgaccaaaaattttttgacaattgcatctttaaccatggacattttaagttttgtcctcagctgggcgcggtggcttatgcctgtaatctcagcactttgagaggccaaagcaggcagatcatttgaggtcgggagtcggagaccagcctgaccaacatggagaaaccccgtctctaataaaaatccaaaatttgctgggtgtggtggcccatgtctgtaatctcagctactcaggaggctgaggcagaagaatcgcttgaacccaggaggcggaggttgcagtgagctgagatcgagccattgcactccagcctgggcaataagagcaaaactccatctcaaaaaaaaaaaaaaaaagttttgtcctcttccttcttgaggagttgctttgaagcttcacagcaaccaaggaatctatttcactgatgaaacaattcaatctactttaacatatggctggttatttagaatgtccattttgcatactactctcagtcttccagactgctggaatgtacaaataaggtaatagaaaatcaatttacaaagcttacagaaacttttaaccttccgtggcctaaggcttttccaatggtcctgaatgaaggaacctacaaaccagctctccttaatgtgagctcctgggagacaaaaatatcaaagatcaagggctccaacctggagattttgtttatgagaaatgccatctaataaaggactccctacaaccatgttgaagagaactccagcctgggcaacatgatgaaaccccatctcaacaaaaagaacaaaaaaagcaaaaattagctggcatgcacctatagtcccagctacttgggaggctgaggtgggaggatggcttgggcccaggaggcagaggttgcagtgaggtgggttgtgccactgtactccagcctgggcaaaagagccagaccctgtctcaaaataaagaagttgagggaggcatatcagatattcttaaccaatccttgtgcaagctaaattcaaaggcattgacttgcagattcacatttttcatttttaaaaaatgcagcccatggccgggcgcagtggctcatgcctgtaatcccagcactttgggaggccgaggcgggtggatcacgaggtcaggagatcaagaccatcctggctaacacggtgaaaccccgtctctactaaaaatacaaaaaattagctgagcgtcgtggcgggagcctgtagtcccagctactcgggaggctgagggaggagaatggcttgaacccgggaggcggagcttgcagtgagccaagatcctgccactgcactccagcctgggcaacagagcgagactccgtctcaaaaaaaaaaaaaaaaaaaacaatcctgcttgagtagacatcttcgatcattccagatctccaactgaggcagtcccattccccaagaaggaagaggacaaaacttaaaatgtcatggttaaagatgtgattgtcaaaaaaaaaaaattggtcattttagtttttgtggccgaaatctcaataatcataattatgactgatagcataccatataccagtcatcttatagctcacacgaggatgagaagtagaaaatttgttagaaaatatcactcaggcggtcgggcgcggtggctcatgcctgtaatcccagcactttgggaggccaaggcaggtggatcacctgaggtcaggagttcaagaccaggctggtcaacatggtgaaaccccgtctctagtaaaaatacaaaaattagtcggttgtggttgcaggcacctgtaatcccagctactcaggaggctgaggcaggagaatcacttgaacctgggaggcagagattgcagtgagcagagatcacgccattacactccagtctgggccacagagcaagactccatctcaaaaaaaaaaaaacacacacacactaaaaaagaaaatatcactcaggccaggtgcagtggctcacacttataatcccagcacttttggaggccaaggcaggcggatcacttgaggtcaggagttcgagaccagcccaacatggcaaaaccttgtctctactaaaaatacaaaaattaggtgggtgtgatggcatgcacctgtaattccaactattcgggaggctgaggcacgagaatctcttgaacccaggaggtagagattgcagtgagccaagattgtttcactgtgctccagcctgggtgacagagtgagatgctgtctcaaataattaaattaaaaattaaaaaatgaaacgtttgaagagttaaaatgcctccaaatattcatacattgcttaaaatggtaataatgcctctaagcatttgatcaaatcacaactttaatactacttttttttttttttgagacagagtcttgctctgtcacccaggctggaatgcagtggtgtgatctcggctcactgcaagctccacctcccaggttcatgccattctcctgccttagcctcctgagtagctgggactacaggcgcccgccaccacacccagctacttttatttttgtattttttagcagagactgggtttcaccgtgttagccaggatggtctcgatctcctgacctcaagatccgcccacctcggcctcccaaagtgctgggattaccggcgtgagccacagcgcccggccacagcttgaatagttctaagtgttggggttttttttcttcagggtttttgaactttaatacttccttttttttttttttttttttttgaaacggagtctcgctctgtcgcccaggccggactgcggactgcagtggcgcaatctcggctcactgcaagctccgcttcccgggttcacgccattctcccgcctcagcctccccagtagctgggactacaggcgcccgccaccgcgcccggctaattttttgtatttttagtagagatggggtttcaccttgttagccaggatggtctcgatctcctgacctcatgatccacccgcctcggcctcccaaagtgctgggattacaggcgtgagccaccgcgcccggccctgaactttaatacttctaagtgttggggttttttttttccccctcagggtttttgtttgttttttcctgagacagggtctctctcttacccaggctggagtgcaggggctccatcatagctcactgcacactccaactcctgaactcaatcctcccacctcagcctcccatgtagctggtattacaggcatgcaagaccatgctcagctaatttttatatttttttataaagatggggtcacattttgttgctcaggctggtctcaaactcctaggctccagtgatcgctcaccttggccacccaaagtgctcagattccaggtgtgagccactgcgcccagtcctgaaatgttcttaaattctttcaaagtagcaaaatttatattaaaacattccaaacatgatgagctcccttgctctacaaggatttacaagtagaatcaattaggtggacagttatagctgacagttgacagagagatagttatagatggaggtaggtatagagggagggaggcaaaaagagttaaggaactggacagctgagaactgtctacaggttccaaaaacaagacaaagaaccttttattatctgccaaacaagacagtctacattgagactgctctgcctttcgtttttatgtgtcaaagacacttaaattggcctgtaatcccagcactttgggagaacgaggtgggcggatcacctgaggtcaggagttcaagaccagcctggccaacatggtgaaactccatctctactaaaaaatacaaaaattagccaggcatggtggcgcacacctgtggtcccagctactacggaggctgaggcggggggatcacttgaacctgaaggcagaggttgcagtgagccgagattgtgccactgcactccagcacgggcaacagaacaaagaccctgttaaaaaaaaaaaaaaaaaacttaaatgagtcccaagaaaaaaggaaaaaagaatgaatattgtgatgtgtggggcaagacaagatctagatggtctaaggacaagcaaatctggggaattaacttctgcccatccaaattacaaggaaaacagatgctttgggcaagtgtcgaggaacagtctcatacttaagacaaatgtaggcttacgggctgagaattcttggtgtaaaggttgaaaacggaccttaaacctttacgggacattgacacagagaggtcaaacccgcgcccaggacgcacagtcagtgagaggcagagctgggaagggaacccggagctccaggcatcggctcctccacctccacctgcgctacccggtgcattttctcctccgtgctcactgctggtgttgcctcttggaacctcggcagtttctgctttcgcacctgcagggtttagtctccgggactgcttgggaggacacctggaatgccgaaggcaggactacacaccgggcgaatccaccagcgccaccaagcccttgaaaacccgaggccgccgcgcgactccatttcccagcgccccgcgcggcaggggcttggacgttgccaaggagaccggtagtggccccgcctccacgcagggaaacaggcgggaaccacgtgacccggaaggctgtacgcaagcgtccgcggcgcgcactgggccaatgagaaccgaagggctggacttccggcggtgggactgtcacttcgccgcccgcgtcaggccacaccggtggtctgggctggggaccgcgggtcgggtccggtttccagggggttcctggtgctcgaggctggcggcgaggaaggtactggctgagggcccgcgtcgggcccgccctgcgcacgcgtcgtgatcaagggcgccggccgccggccgcgcccccaagcctctgtttctcagagtgcgtcgtgggcgtccaggggactgtcgggccgcggcgggagccatgcgctctcccaccgtgcggcagcccaggaggctgcgcgctgggcgttccacgtccatgatggccggggagactgaggcgcggggcggccccgggacgctgctggcggggaaaggctgggtggtccacgcctttcttccctcccagctgcgggttccgctggcggcggtggcgctgacaagcccgcgtcggggaagcaggggagtccctgctcacacagaccgcgccctcacggagggaggccgcttcctagacctcgcctagtcgtctttcctctccctgccctgggggggttgcgggggtcagtgcaaactcctgcgtccagggcactggtgagctcccgagttcgggcagccagggggctgaggtcccgaaggaggctccgaggggagagtcctgcgtgtgcaaaacctgggaggggagccgaagcccaggtgcttctgggactgagctctctcgatgtggagctggagtagaggggatgtgtgcggctgcagtatcaggcgagggagtgggctttatctcgagggcgtcgggagacatagaagttttgaacagaatcaggacatcctctgaggactttaaaacggttccaccgtttgttgcgtggagaacagacatgcaggggtgtcggcatgaagggaagaaccgactgccacagtctgggcagcagtggaggtgggcgaccaggtgaattctggtggatctgcggatgcatcaggtgtgggctgtttgaagaactaagtaccccatgttgttcagcctgagcgcctggaagaagagagctgctgtagatagaaaggagaattgaaaggaaagcaggtttccttcaggggaaagatcaagagtctgggatgtcccaggttggtcatgtcactggacctgacgttgttggcgtcctgggctgtggacagggcctatgaattggactgaggaatgggcagggactcagccaggtgtgggcagttatggcttgagggtaaagaagaccagctgggatgcctggggctattgggaagagcctagcacctaactgaggaggggagggtggcaacagagaggggaagaaaggggacaccgggtgaaaggaggaagggattgagttcctctgtgttcacaggttgttgaggctgctcccctgtggcgactggtgagaatcatccagtccctcaggctggatgagcagcctggaaatgtcaggcaagcaggctcagcaggggagggtcccagtgatgggtatgcctgggaagcccctgctgggactcacagtttcttgctacaagagcaggaagggtgcatctggggagggtcatgagtggtcatgctgagtcacgagtggacacctggggctgctcttggtgtggcagctgagggcccagccaggacttgttctagcttgcttgtgtatggcgttgccagtggggaggccaagaaggcatctggggtctggtcagggagggcagaggggaggggtcccagacatgtgagggaagtgccatctgaagatggtgggggcagaacccagggaaggagggtgagtgtctgagggacatcatggaaggtggctgttgggatggggagcttggtcctggctcacagccataccttaaactaagcttgtccaacccactgcccaggatggctttgaatgcagcccaaaacaagttcgtgaactttcttaaaacatgagatgtttatgcaatttttattttttttagctcatcagctgttattagtgttaatgtattttatgtgttgcccaagacaattcttcttccaatgtggcccagggaagccaaaagattggataacccagccttagaccatggctgtctcttcctccctgctcttttaggaccagatggcctttgaggatgtggctgtgtacttctcccaggaggagtgggggctcctggacacagcccagagggccctgtaccgccgcgtgatgctagacaacttcgcacttgtggcctcgctgggtaaggtcctagatactccatgaaatgggcaactgataacaagctgactggccagggctgccccctcacctccctggtggctgacgagcaggcctataccttgcagccaggagccatgtggaataggggtctggtcctatagacatgcagtctggttggctcaaccactccctgtggcgctgtccggctgtggcctctccgagccttggctcagtccccttcctttggtgccctgggcacagttgctgccctggggatgaatgagctattcctgtgagccccttgccctgtgccatctttagattctgcagttgcacagatgacattttctgtttccgtgaagccctgactcctgccctctgtttggaggtgggttatcttgagctggggctggactctaacctgcacctcctcctcacaggactctccacctctcgacctcgtgtggtcatccaactggagcgtggcgaggagccctgggttcccagtggaacggacacaaccctgtccaggaccacctacaggaggcgcaaccctggtgagagggagctcagggtggggtgaattcaggaccaacctgtggtcatgcctctgtccctggttcccagactccccagaagcaccctcctcccctccctcccacccgattcccttcccttccatcatcagcccctcctggaggctgcagccttagctgcccttgaaggtggagctccaagggcacaggagcggggttgacacagaagggcactcaggctatggtgagaccatctcagagtcctgctatcagctgggctggcctcaaaccctccatggctagtcactgccataattgatgggtcatttttttcacccttcatctttgtgttcagcaaacatttcctgagtgctcacagtggtcaggcccagtccaggcaatgtagacacagcctcaatcaggacgaccctggtcctgcttttctggggctcatggtgtggtgggagaggcagtcggtaagcaggattcaggagtatagtctagagcactggatggaggtcattgcaggagcaggttggggagtgggtgcctgagaagggggacaggggcggggggaagggggtaagcaatggaaagagtgtgggtggaatagccagtgtggagatgtatgcagcatacagcagccgctagttttcctcagcttcacatcctgggtgtcggggggctgccaccttgatcatgggagtgcccagtgtagtcagtgccatacctatcagggcagattgttcctccaaaccccagcccctcctgcagggccagcctcacctctacttttcccctaagcttttgtgccagctccggggttccttcttgcctgtccactcagcctgccctggtcctctcctaaccaggatgccccaggcaaccactgtttctctgcctttaggttcctggagtttgacagaggatagagatgtttctggagaatggccacgagctttcccagataccccacctgggatgactactagcgtcttccctgttgccggtgcctgccacagtgtaaaaagcctgcagagacaacggggtgcctccccatctcgggagagaaaacccacgggggtgtcggtgatctactgggagaggctcctgctaggctcaggcagtgggcaagccagcgtcagcctgcgactgacctccccgcttaggcctcccgagggcgtccggcttagagaaaagacactcacagagcatgcgttgctggggaggcagcccaggacgcctgagcggcagaaaccatgtgcacaggaggtccctgggagaacctttgggagcgcccaggacctggaggctgccggcggtcggggacatcaccgaatgggtgcagtttggcaggagcctcatagactcctcggtggccaggagccctcgacctgggacgagctgggcgaggctcttcacgctggggagaagtccttcgaatgcagggcgtgcagcaaagtgttcgtgaagagctccgacctcctcaagcacctacgcacccacaccggggagcggccctacgagtgcgcccagtgcggcaaggccttcagccagacgtcgcacttgacgcagcaccagcgcatccacagcggcgagacgccctacgcgtgccccgtgtgcggcaaggccttccggcatagctcctcgctggtgcggcaccagcgcatccacacggccgagaagtccttccgctgctccgagtgcggcaaggccttcagccacggctccaacctcagccagcaccgcaagatccacgcgggtgggcgtccttatgcttgcgcacagtgtggccgccgcttctgccgcaactcgcacctgatccagcacgagcgtacgcacacaggcgagaagcccttcgtgtgcgcgctctgcggtgctgccttcagccagggctcctcgctctttaagcaccagcgcgtgcacacaggcgagaagcccttcgcctgcccacagtgcggccgcgcctttagccacagctccaacctcacccagcaccagctcctgcacacgggcgagcggcccttccgctgcgtggactgtggcaaggccttcgccaagggcgccgtgctgctcagccaccggcgcattcacacgggcgagaagcccttcgtgtgtacgcagtgtggccgcgccttccgtgagcgcccggccctcttccaccaccagaggatccataccggcgagaagaccgtccggcgatccagggccagcctgcacccccaggccaggtctgttgccggggcatcatcagaaggtgcgccagcgaaggaaaccgagcccactcccgcctcgggcccagccgccgtctcgcagccagcggaggtctgaggtcacaggttgcagccctggccttctgtgaatcccttccacagctaaagggcatatgtcctctgcagatccacagcagagaaaaagtcccgtgcttgctagtcagggacaagggaggccctttggctgtgatttcatttgcacgtggggacaggatttgccagttcacccacagatcacacctccatccccaaagaggtagcactgcagcaacatcagggggaggacgtggtggctgaactctagtggggccgagactattcagagccagtaggaggccgacagtcacagcactgcactgtggtgcggcttcatgtgatatgacagtggatgctaaggtgagagggatgcaggcatgggttgggggtggcccagagaaacttatgacagctgtacacaaactggccgctggagagatgcccgctgagggtattctcccctcaacccactgcctctgttcatccaagacttcctaggggccagcctagcagacaagagaccacaagggactggggatcagggtctgggctctgtcagccgccacctctgggaaagagaaaaggtttgggtccactgaacatcatgtttgtagacgctgacaggtggggtcctaatgagagccaacacatgctcactgccagctcctgtcctgagtactgggaagtttctcctgaagccctgtgagatggctctgtggctggtatcccgacttggaagatgaggaaactgaggcacacggcctggcctggcttcacacacatagccgactcaggagagggatgcccatgggggaacatgtgactctcagcattggaaggacagagctaggatgatggctttccggtggcactcgttcaggtttttgcccaagtctcagcttggccaaggcctgtcactgactggtttaccaaagtcgatgtgaggaggaggctttatacctgaggggatgatgttaacttcagacaagatggagctgctcacttttgccgggtttggtggccacttcacccccaaccctgtctcacccccattatccctcctcaattggaggctggacagagctgaataggaaagacttgctattgcctaaggctatgtgtgacaccctcctgaggacctccccaccccagtgtaatggcccttcatggcagggacagaaaggtggactgggggccatttgcttcctgtggccttcagcagaccaggccctgtccctacctggagcctcacctccaaggaaattcatgttctccttaatggaaaaaaaaaaaaaaagactaccatctgcaactcagagtaggtgttgcagtttcctgtacagcagtttggacctccagagcacagcctcttgtccctactccagagcatggttcagtcttaatagcagttcaagagcttctctgataaaggtttctttttaaacatttgtgtgaacggtagcaacctgacacctatttcaccctcatacaatgcagatggtattgaacataccctgacatgccatcagcgtttgtcatcatcacagaagttcctggacttggcttcaacctgggtaccctcaagaggccacagagtagagatacagcctgtctgcagcccagggagggagtgggatacctgtatccttttcagggtcagaggtgggttggggtagccaggagctggatgaactgggatagagtggggctgtctggagcagcagccctgctagatgagtcctggtggatcctggcaatgggaggatggtaggtggagaaaccaaggcagggctgtgttccttctgctgctgagatagagggtgtggccatgtgtgatgaccctgcaaggttgactccaaccagtgggcactccatcccatggcttccaaaatcctgcagctatcctgccctatacacaaagagcccagatccaggccccacacacttgatattggggccagactcttccacctgtgaaacctcacaggttcctgcagggagtggagacacacagaacctagctcccctggagcctgcaagacttgggccaccagaatcccagtaggtccctgaaccattgtcccccagtaagtctgcagagctgtgaaatgcagacaataacccttccctgcctgaaagagcacttttctggggagcccatgggagtcaggagcaaaagcatctgtcaaacaagtagatacccagagagtcacgtgaaatcatttctatgcctctgacagacgcttcttgagcgaagtttctgccctgagcccgcctgaccccttaggctgggctcagtaccctaccttgtcttcccaccagccgcctccctccatcaagttcctttccacgtctgcttgtgcccctgttgtccctcagtttgtccaccctcctccaatcttcccctccccaaacccatgactgatcagtggcccccaacctaggctcccacctccatgcaggtcttggcccctcggctgacctccctccaacctccccctctgctcttaattttgaataggtagtgactgtaaaagtatccctgggcttctatgtcaaaaggtcagactgaacacatgcatctcactgggctcagaaatccactgaaaccacagaggggagtatttaaaacacataacccacaagtatgaggatggtgacagaggagtcaggagcaatggcattcctaagctagaagtgggtgagagctgtcactaagttagggaaggcaaaatactacgtggcgacttggcgaagaggagagagttcccaccaggctgactccagaaccgcagaaggctgagaaccagcagcccagagacgggagacctatatcaaagctgcctggggaacaactactgaagaagcccttaacgccccagtgctctccccacatggtggagggtgaaagtttttgtttttttttccttctgggactctgcatagtcccagagaaaaggcctaagcacctcatccccaaaaacaacctgaggaggccgttggaaagctccgagttgacaagtctcatccacgcacatgctcggtgcttccaatcggtgatcaagaccactgctcttcatccagagcaggcagcagggattcccaggtatccaaagaaaccaaaacaggcggtgtaatttaggactgactaagtaatggctcggccacttttaagtgtggaagcaaaactgaccccacagatttagaaaactgtaacactgcttattgggagaaactagtgtcaccctggctagttctgctccccaaattcaaaggtaaataaacggttgagcatgtccgatcagcctggagggaaacctccacccccgactttgtaggactgacatctgaagacgtcagagactgcggtcacaaccgtcggtacctccttagggcgcttaacagaggtcaaagatggccctcgcaccctcctggcgggagaaagcccaggctcagggtggtcttctacaccaccgcctctcccgggtccacttggaagcgagtcccagcgaactactcgacctaggaaaccactgggccgccacttccagcctcttcggaagtcgaggcaacgctcctgaacgttgccacgggaacagctggaggcgggcggatatgccctagcgttatctaggggctggcccggggaatggcgtgggggcggcggggccaagcaagcgccacctctgattgggcaaaaccccctcccctcacctgccaatagaaaccggcccactgtacagacgcgcaagtttataacccgggaagagctgctctcagagcggagggagaccatataaccctgggactctgccgtacctcctagaggaacagagcgcctctcaggcgtcagaggctgctgcaaatgcgggtcagcgggtcacggtcgcgcctgtcttgctgatgctcatgggaaatgtagttcaaagggcatgggcggtgccttcggtgcaggcgagagattggtcagcgcggcgtcgccggggcaacacccggctgaggcgccccgcgttgtgcggcgccacatccgggaagcggcctccaagcaaccgctccgggttgaggtgagcgcaggctgccagagtgggcgcagcctttccaccccgtgggagggcttggggtcgccctctggggcctgaacggctcctgctgtcggcgccctggagggcccgcccacttcccgacaggccgcgcgcgtcacctcagccttcgctcaggcctttcctaccctcaacgccgttccggggggccgggcctggcaagtcctcttggaacgcctccctcttgccttccccttttggggacagatcccgaagttcgagcatccctcggataggccgggtgtcaggcctggtctctcaggcccgtccaggtgggcgtctttcactgcagaccttcagggccgggatgctgtggccatccctcgactccgcgcaacgtggagctttggccccgtttttcttggcctttgcttttcgttttcacatgcacgggccccggcagtgtgagtcgcccacggctcgctgtggtcagcgagcacgatgtccacgtgccccctccccagagccattcctaaaggaggtcccacccagtcaacctccccgagattgtggagggcgactcgtccccgtacattacagcctggccccaccttctacccgcccaccctggtccactctcctcgcacctcggctagacactgtggctcctcagcctggcgctggaactctgtgatgactgtctttctccacctctttagcgtcatctcccagcagtcccctgctggacccaactgtttgcaatttccaggaagctccctggacaccttgcgtccaagcatttgtccctgaggcttcctcctgctctcatttgccatcattgtttgggtcctgtgaccctcctccttccatgaagctttcttggccttatctcttctggcctcagagtacacttggtcctggtctcagccccctgggctgagcctggtgtctgccttcccctggccagattctcttggctgacattccgacccttccttttctgtaggcccatcttgacgattccaagaccacccccttgagcaagaatgccatcccctctgggtcccccatgcctgcccgtcatggacccagagaccacccttgaggagcctgagactgcccgcctccgcttccgagggttctgctaccaggaggtggcaggtccccgagaagccctggcccggctgcgtgagctgtgttgccagtggctgcagcctgaggcacactccaaggagcagatgctggagatgctggtgctggagcagttcctgggcacactgcctcccgagatccaggcctgggtgcgcggtcagcggccaggcagtcctgaggaggccgctgccctagtcgaaggactgcagcatgaccctgggcaactgttgggctgggtgagtgtggctggcatcagcttcttggagggatagaccctggctagagccattgtgacctacctcttctcctcagatcacagcccatgtcctgaagcaggaggtgctccctgcagcccagaagacagaggaaccacttgggagcccccacccctcagggacagtggagtcccctggggaaggtccccaggacaccagaatagaggggtctgtccagctcagctgcagtgtgaaggaggagcccaatgtcgatggacaggaagtgggtgaggttggggtcccaccagagatgagggactcctggaggaagtgtggacattcctggctagggtgggagtcccaggagaggtgtgtcaaggctgggactcctgaagtgaatgtggatgtccctgtctgggatggggacctgggaggcaggagccaagggctggctacgtgccatgtcacacagcagaggagctcctcatctgccatggctcatgtgggcagcccctgacaccacccttccatctgccccacttttcagcaccctccagccctccacttgcagcacagtcccctgaggggaaccatggacaccaagaaccagcctccacatccttccacccacccaggattcaggtgagcagccccaagtgggaagtataggccccaggtgtgagaagggactgtccccatggctgccctctgcctggtggttttccaggctccttgactagtggctctttgcttcccagaagtggagtctgtaaaagctgtacccctccacaggacctggggcagagggacagactggtgatctattattgaaaaggatttggggctggacatggtggcttacacctgtaatcctagcactttgggaggctgaggtgagcggatcacctgaggtcaggagctcgagaccagcctgaccaatgtggtgaaaccctgtatctactaaagatacaaaaattagccagaagtggtggcaggcgcctgtaatcccagctactagggagggtgaggcaggacaattgcttgaacccaggaggcagaggatgcagtgagccgagattgtgccactgcgctccagcctggtcaacaagagcaaaattgtgtgtcaaaaacaaaaaaaaaaaaaaggatttgggcctcaagccatggaaacccagtttagagtggctggaactagtgggcttggcttcctcacctccagagaagtcagctgggaggtttgctgctcccagaggtcctgagccagacctggggatttgaacttttgtgtgtagctggggaggggagaagatgaccagctgtggcaggactccccccacacctgagaccagatggagacactctccctgggaaatgcccgaagtcccttctctcctaggggtttcttcagaggccacctgttaggcctggaagctcagcttgaggcctcttctacctggatcgcttggttcccaagtgtgggtagcaaggtcttttcctctcccggctcctctaacaactccactggggagcttcagcagcaacattgctggttgagatgtgtttcgaggctaagaagtccttccaggctccctccacagccccatggcacagtcagaaagtgaggcagggtgggtaggctgcacttcccagtgtcctcacctccagccagcaccatctctagctgtggctcctcacagctgccgccttcctgcccctggacttgccacagcttgtccctcaggattatttttcccaacccagcaaagccccagatgatgggactcaggcagcaaggagggctgacccccaatcagggagttcattcctcgataaagtcactcaggtccctgtgatgctgccaaacctgccctctgagcaggatggtgtagtagagggggatgagtgctggcagcagcactggtcaggtgatctgaaggagaacctctgcacttaacaaacacacaccttgagatcattctcagcaggaggggcagatgaggcgtaggtaacctgctgactcttccgggtaataggtaagaatgtgaaccagacagggcagggaaggggtggaaagacgcctacagtgatgggccacatccgcaggaggagtgggggctgctggaccggtcacagaaggaactgtactgggatgcgatgctggagaagtacggcacagtggtctccctgggtgaggaccagccagccccaccccgcccctctccctggggcctgcacccaccctgcagcaggcctagctgggcagggcctctgtgctaccagccctacccagctctcccaccttccagaggaacaccctgtcacctaccagaaccgaccccacccctccttcatgcaaaccccatgcctaactgtgccccccacccgggcagggttaccgccccaccagccagaggcacaggcccagtcagagctggggatgctgctcacggggacaggcgtctgcagaagcctgcgctcgggtgagtgccccacaccatccagcctgaatcacccctcctgtatcggtgggacctgagccacccactcatggggggacgggagcttgtgccacggccacaagcctgagggaggggttgctgagtgccgggactcacctggtttgcccctgcccccaggaaatgagagtgagggtccacctggctgcccagaggcccagccgccccagggcccagggccggcagcctgggagggcttgtctggggctgccactcctgcccccactgtgcgcccagggacaccgccagtgcccactcagcccacacctgcagagacgagactggagccggctgccacccccaggaagccctacacgtgcgagcagtgtggccgcggcttcgactggaagtcagtgttcgtcatccaccaccggacacacacgagtgggccaggtgtgcagtccccggggctagccaccggggaaagcacagagaagccaccacaaggggaggtggcctttccgcaccacccccgacgctcactcacaggcccccggagttacccgtgtgaggagtgcgggtgcagcttcagctggaagtcgcagctggtcatccaccgcaagagccacacaggccagcggcgtcacttctgcagtgactgtggccgcgccttcgactggaagtcgcagctggtcatccaccgcaagggccaccggccggaggttccatgagcagccagacagcacagtccctcggggcctcggtgttctcggggcctggatacagcctctggggcaccagcagaagactctggaggcagcaggggatgccagagtgaacaaggggtcccaagccagttccctgcccctggtctggtctcccccaaaagacctgggtgcaaggaaaaggagctgctctctctcttcttgcccctgcctcctagagggaggtctgggttcccttctatggctgaccagtgcctgtggggtgactgccaagcaccaggctccctccctccctgtgacatggcctgggctgacaacactccctctcctgggacctccttgcctcaggtgggtgttcaaaaactgtgccttcccactcgtctgtgcagaggctgggcctgaggtctcagtgtggagagcagcagaagacccaggaaagcacagttggcttccgtttctcctgctccctgtgtgtgttagaattttaacataaattccactttcataatatggagtttctgaataagaatcctgatttctggcttctgctggtcgggaaataggcagtttgctgtctctgcccagtagctgcagcacagggcagttgagcccagaacggccaaacctctgttgccacagaacccaggtcccaggtccccagcctcccttgctccttgccgcccacatcactcaccagcctcactggccttggaactcatcagtcccggcttgagagacacaaaggggatttcctttcgaagtacggctggacaagggggacctctgagaagaggggctgcaagcaggggttgcgccaaggccatgggtacttctaggtcaggccgcaccctccatagttagctggtcatgcagcaggaaggcaaaaggtcagctccctgggaagcaccggatctctgggcagtcactggggactcgccaatgcactgtattagttttctgttgctgctttaacaaacttggcagcttgaaacaacagattctcttatagctctgaaggtcagaactctgacatgggtcccactgggctaaaatcaaggttttgttttgttttgttttgttttgttttgtctgagatggagtctcgctcagttgcccaggctgcagtgcggtggcacaatctcggctcactgcaagctctgcctcccgggttcacgccattctcctgcctcaacctcctgagtagctgggactacagacacccgccaccacgcccggctaatttttttgcatttttagtagagacggggtttcaccgtgttagccaggatggtctcgatctcctgacctcgtgatccacccacctcggcctcccaaagtgctgggattacaggcgtgagccaccgcgcccggccaaaatcaaggttttaacaggactggttcctcttgaaggctctaggagagaataatccattttgttgccttttccagcttctagagtcagcccacgttcccccttttttttttcttggtccattcctccgtcttcaaagccagccatggttggtcacgtcttccttaggctgccagctctctgacacccatcgatcctttggcctccttaaggaccctcatcatatcttgtcccctacctgcacacttagtcacaccgcagagtcccttttgccaattgagatgttcacagcttctggggattggaatggggactccttgggggccttgattcagcactcttctccttcctactctgaaaacaaggggcattttcacaggggatggtttcaggaaatgggtgccctctcggaaggagccctcgccagctgctggtatgtgcagcatgtgcacaagtcgcaggtggatgttgagggtagctgcgactgtggttaccccaggaggggctccctgggaggggcaggaaccctgctgcggcctgaagctgggagagggaggctctcctcagaggcccatcttccccatccccttttatgagggccttctaacccgttgctcccatgtgcagggctccggaagcagggccagtttggagatggagctgggggtgggtgatctgtgagcaagcaggaggcgagagctgtgctggggacagagaagaagaagacagagcagtacccaggggctccagctaggccccagcccagaagggagagtcagggtatagaaggctgtgaaagggccagatcatgcaagaaaagctgcagggggtgagggcagtttttaaataaactttttcacatttagaagcaatttatgctcacttagaaaaatttgaaatacacaagatggcaaagaagatcatgaaaatgttccctaattcaactgtctcatggcaatgcttactccagaagtttacatatagaagtggttgaatgtaaagtttcttttaaggcaacttatgttgtttcactttgggagaccacgagttcaagaccaatctgggcaacatagtgagaccttgtctccaaaaaaaaaaaaaaattaaaaataatagtaggctgggtgtggtggctcatgcctatattcccagcactttgggagaccaaggcaggtggaccacttggagttcgacaccagcctggccaacatggtgaaacctcaactgtactaaaaaaaatacaaaaattagccaggtatggtgacatgcacctgtagtcccagttacttgggaggctgaggaataagaatcacttgaacccgggaggcagagctgcagtgggccaagacggcgccactgcactgcagcctgggtgacaaagcgagaccctgtctcaaaaataatactactactaattagccaggcatagtggcgcatacctgtagtcccagggagactgaggtgggagaatcacttgagcccaggaggttaaggctgcagtgagctctgataacaccattgcactccagcctgggcaacaggatgagaccctgtctggaaaaaaaaaatacggaaatgggagacggaagggtaggtcagagagagggatgatggatgaaataactgcaaatattcacaataggagagggatgaccccaccatatggaatgcttcacaaatttgtgtttacccttgcacaggggccattctaatcattccaattttagtgtatgtactatagaagtgagcgagcagttaacttttttcttttcatgcctggatgaatctattttctggctggcaccatcatttctaccaagaccaaagaatttcttgttccctcctcaccctgcagtacccagtgctatgattaattctcttgagtaaacacttggatactactgtggctatttctgtagtataaatttctcaaaatgggattggtgagttacagggaacatgagatttatttttgccttaaaacagcaaaaacttattgtacaattctggagaccggaagttagacaccatctcaccaagctaatactagagtgttggcaatggctgggcacagtggttcactcctgtaatcccagcactttgagaggctgaggcaggaggatcacttgaggccaagactttgagaccagcctgggcaacagagtgagaccccatctctaaaaaaaaaaaaaaaaaaaaaaacacacaattaaaaaaaatttttttagctgggtgtggtagtgcacacctgtagtcccagctacttggaaggctgaggcaggaggatcacttgagtccaggaggttgaggctacagtgagccaagatctcacgactgcactccagcctgggcaacagggcgagactccatctcaaaaaaaaaaaaaaaaagtgttggcagggctgcattccttctgtaaacactagggggaaaattgttctgtagctcatggccccttcccccatgtggtggctcacacctgtaagcccagcactttgggaggcaaaggcgggcggactgcttgagcccaagagttcaagaccagcctgggcaacatagcaagaccatgtctctactttttttcgataaaattttttttaaaaaattttaaaaaccaatcagccaattttccccaagttaatctataaagtaaatgaaatgcaaataaaatataccacatttcagccgggtgcagtggttcactcctgtaattccagcactttgggaggccaaggcagggagattgcttgagcccaggaattcaagaccagcttgggcaacatggtgaaactccatctctagtaaaaatacaaaaattagccaggtgtggtggtgcacgcctgttgtcccaactactcgggaggctgaggcaggaggatcacctgagccttgggaggcagaggctgcagtgagccatgatcgtgccagccggagcaacagagtgagaccctgtctcagaaaaataaaaagaagcacattttatatgatccaacaaaaagattctaaaatgcatgtggaaaagtccaagaattgctaagacaatttggaaaaaacgacaagtagggaagaattgtcatattgtaaataaaaacactgttaagttatataatattaaaatagtgtggtggctgggcacggtggctcatgtgtataatcccagcactttgggaggccgaggcgggtggatcacctgaggttggagttcaagactagcctggccaacatggtgaaagcccgtctctactaaaaatacaaaaaaaaaaaaaaattagccgggtatagtggcacacgcctgtaatcccagctactcgggaggctgagacaagagaatcacttgaacccagaaggcagagattgcagtgagctgagatcatgccactgcactccagcctgggtgacagagtgagactccatctcaaaaaaataaaatattgtggtattggcacaggagtggacaactaggtcaatctaggaacagaccttttggaacttgatatacatgaaatgactcaaccaatcagtgaagacagggtggatgttcactgaatattggagaaaactgaactcccccatacaaaagaaaacagatttccactttacacacactcaaaattaaattccagattaaatactaggatatttttaatgatttattaaatttttttttggtagagacagggtctcaatatgttgctcagcctagtgtcaaactcctagcctcaagcaatcctcccttctctacttctcaaattgctgggattacaggctgagccaccacacccagcctgatatttatttttaaatatcaggaaaatgtaaaactttgttttgtttttgtttgttttgagacagagtctcgctctgtcacccggggtgaagtgtagtgtgaacatggctcactgcagccttgacctcctgggcacaagcagtcctctcacctcagcctcctgagtagctgggaccacaggcacatgccaccacactcagctaactttctttttttttttttttttttttttgagatggagtcttactctgtcacccaggctggaatgcagtggtgtgatctcggctcactgcaacctccgactcatgggttcaagtgattctcctgcatcagcctcccgatagctgagactacaggcacgtgccaccacgcctggctactttttgtatttttagtagatggggtttcaccatgttagccaggatggtctcaatctcctgacctcgtgatccacctcggcctcccaaagtgctgggattgcaggcatgacccaccattcctggcccacactcagctaactttcagtttttgtttgtttgttttttgagacgaagtctcgctcttattccccaagctggagtgcaatggggtaatctcggctcactgcaacctccgcctcctgggttcaagcgattctcctgcctcagcctcccgagtagctgggattacaggcccccgccaccgcacccggctaatttttgtatttttagtagaggcggggtttcaccatgttggccaggctggtctcaaactcctgacctcaggtgatccgcccacctcggcctccccaaagtgctgggattacaggcgtgagccaccgcacccagcttttttttttgggggggggcggggagagatgaggtctcgccatgttgcccaggctgaaagtaaaaattttatgacctcaagagttgaaaatgatttcttctttttatttttttgagacggagtctcactctgtcgcccgggctagagtgcagtggtgcgatcttggctcactgcaagctccgcctcctgggttcacgccattctcctgcctcagcctcctgagtagctgggactacaggtgcccgccaccacacccagctaatttttgtattttagtagagacggggtttcaccgtgttagccaggatggtctgaccttgtgatccgtccacctcggcctcccaaagtgctgggattacaggcgtgagccactgcgcctggccgaaaatgatttcttaaataataacacaaaaagtatacagacccctaaaaccctgccaataacaagtattggttaggcagcacagaacaggacctgtgaatttgatgagttatcactcctgtgatttgatgatgtcatatggcatagttgcccttgttttgttttgctttgttttgttgagacagggtctcatttgttgcccaggctgcagtgcagtggtgaaaccataggtcactgcaacccggaactcctagtctcgagcaatctgtccatctctgcctcacgactaaagaaacaactggcaagtttaataaatcgaacttaaatctctgaaaagacactgtaaacataaataaaagataagcaaaatattggaggaaaacataaaccaaaaaaaccctcgacaaacccagaaggtatttttaaactccaaataagtccaggcgcggtggctcacgcctgtaatcccagcactttgggaggtcgaggcagggggatcacttgaggtcaggagttcaagaccagcctggccaacatggtaaaaccccgtctctactaaaaatataaaaattagccagccgtgatggtgggcgcctgtaatcccagctactcaggaggctgagacaggagaatctcatcaacccaggaggtggaggttgcagtgagccgagatcacgccactgtactccagcctgggcaacagagcaagactctatctcaaaaaacaaattaactacaaataaatatgaataggactaaaatatgatagaaacatggagaaaggccataaggcaggaatacacatcagaagaaactaggctgatagaccagaaagaaaatatgcttagcattacatgcctagcagtaatcagagaaaccccagcactgtgaggacagggcttcacctgccttgctcatggccacacaccctgttcatggcactgtgagggcaggacttcacctgccttgcccgtgaccacacaccctgttcatggcactgtgagggcaggacttcacctgccttgcccgtgaccacacaccctgttcatggcactgtgagggcaggacttcacctgccttgcccgtgaccacacaccctgttcatggcactgtgaggacaggtcttcacctgccttgctcgtggccacacaccctgttcatggcactgtgaggacagggcttcacctgccttgctcgtggccacacaccctgttcatggcactgtgagggcagggcttcacctgccttgctcgtggccacacaccttgttcatggcactgtgaggacagggcttcacctgccttgctcgtggccacacaccctgttcatagcactggttggtattcgtagcattgtcaacaaaccagatacacatcaatataacgtgatggatttctcagccttcaaaatagcaagttaaaaaccctgccaattaaaagaaaaggcataaacatgactatgataaaaaaaaaaaaaaaaaggctgggtgcggtggctcacacctgtaatcccagcactttgggaggccgaggcaggtggatcatgaggtcaggagattgagaccatcctggctaacatggtggaaccccgtctctactaaaaatacaaaaaattagccgagcttggtagcaggcacctgtagtcccagctacttgggaggctgaggcaggagaatggcgtgaacccaggaggtggagcttgcggtgagccaagatcacgccactgcactccagcctgggtgacagagcaagactccgtcaaaaaaaaaaaaaaaacaaaaaaatacaaagtgccaatagcaggtattggtgaggaaatgaataccaggacctgtgcatatgatgagctactgaaactgcctttgcaaaattatgactaagacagtgaaagagatctgactaaatcaattccatcttgcttctaacctctaagctgtcctagttcattcttgggcataggctgaagtaactttgagagaaacttatagttcataaccttatggtttatagtttaaaacacagaggataacagccctttcccaaagcagacctccttcttgcctggggaccagatggcctttgtaggactaacattagccccaagattagaaactctggtttaggagtcacgcagctggaggctagaagattctgaccctccctcaactgctcctaagatcagcgcttgggatattttgcagactctgcacttgatggatcagctggccccacccagatccataaaatggctcatctgatcttgtggcccccaggaactgactccgcgcaagacgacagcttcgactctgtatgatctcatccctgaccaatcagcactcctggctcactggcttcccccaacccaccaagttgtccttaaaaactctgctccctgaatgctcagggagactgatctgagtgataacaaaacccttgtctcccgcacagctggctctgcgtgaattaccctttctctactgtaattcccccgtcttgagaaatcagctgtgtccaggcagcaggaaaggtgaacccactgggcagttacgctaccaatcctgtgatatgattgtgtcacatggcatggttgcccttttttctttttgacagtcttgctgtcactcaaactggagtgtggtggcgcgatctcggctgactgcaacctccgcctcccaggttcaagcaattcttgtgcctcagcctcccaagaagctggagtacaggcccacgccaccacgcctggctaatttttgtatttttagcagaggtggggtttcaccatgttggccaggctggtcttgaactcctggccttggcctctcaaagtgctgggattacaggcatgagccaccgcaccagccgtagttttgttttcttgagacaatctcactctgtcacccaggctggagcaaagtggtagagtcatagctccctgcaacctagaactcctgggctcaagtgaccctcccacttcagcctccccagtagctaggacaacaggcacgtgccaccagacctcgccttttttttttttttttttttttgagacagagtcttgctgtgctgtccaggatggtctcaaatttctggcctcaagtcatcctcctgcctcagccttccaaagctctcagattataggcatgagccaccatacctggccccatagttgaacttaaaatagactatatgattatctgggggtgtgggggggctgatctagctacatgatcccttttaaaacatggagctcttggcgggcatagtggctcacacctgtaatcccagcactttgaaaggccgaggcagtcggatcacccgaggtggtcggatcacccaagatctataatttgagaccagcctggccaacagggcaaaaactcatttccgctaaaaatacaaaaattagccgggcatggtggcacgtgcctgtaatcccagctacttgggaggctgaggcaggagaattgcttgaacccgggaggcggaagttgcagtgagccgagatcatgccactgcaccctagcctgcgtgacagagcaagactccatcttggaaaaaaaaaatacaaaaattaggccaagcgcagtggctcacgcctgtaatcccagcactttgggaggtcgaggcgggtggatcacgaggtcaggagatcgagaccatcctggccaacatggtgaaaccccatctctactaaaaataaaaaaattagccaggcgtggtggtggacgcctgcaatcccagctactcaggaggctgaggcaggagaatcgcttgaacctgggaggtggaggttgcagtgagctgagatcatgccactgcactccatcctgagcaacagagcaagactctgtctcaaaaaaagagaaatgcctatttttattttttttgagacagagtcttgctgtgtcgcccaggctggagtgcagtggcatgatcttggctcagcgcgacttccacctcccagattcaagcaattctcctgcctcagactcccaagtagctgggattacaagcacaggccaccacgcccggctaatttttatatttttagtagagatggggttttgccctgttggccgggctggtctcaaactcctggcctcaagggatctgtctgcctcaccttaccaaagtgttgggattacaggcgtgagccaccactcccggccccatacatttattttaaagtaaatttccacatcttgcaataataaaataaacagtatttcaagtcaccttaaaatagataatgtctacattaatagatgttcatccacacagccccgtttatcacctggaaccatacttgagaagtcctgcctaccagtgtccatcaccagctccattcctctgtagttggtgccatctgcaagaatcgagccccttcctggggtttgcacaggctgcagcctcctcctactacagcagatgccaaagggcactgggcatggtgtgggggtcagttcactttcacacagggcttgtgttttccgtggtctcggcaacaccaacagtgtctgaacatgactgcacagacattggtgcccgccgctgcttgtgagctccaagaccatctctccttctgtgggtgccccacttatctcactttttgacccctccccaggtctctggaaccctctcttcagtcttgacttcctgctggcctgtctggaccaggtctgtcagtcctactccccagcaccagatgggccctaagaatccccctcctgccacacctgctatttcctcatatccagcctctcaggctacgatcaccacgccacccttccagaaggttccttccaaccgcccttccgaaaaggccctctccatggccctcttgtcaatgactcactcccagcatggacagcagagacgtgacccacacctctaacccatgaggctctgcccagccctccctggacatgtcagaaaacagagagaccctagtcactgtgggtccagaggcaggaccagcagccacgtccatgccttttcagagcaccctcaccagggtaaggcaagttctagcaaggcagagagggatctgtgtgaggaggtacctctcattaccaccactgttaatcatcattgacttattcattcatagagaaaaagtcatcttgaaccatcaaacccgagagcataatgtcggatacggaaagtcggtgggagaagtcatctgtcattaggggtgggagcggggaacttaacacgggcatccaggaaaaggcaggatgagaagaaaccgtggacttggtaaagtctgtaagaaacgtcaccatctgagccatcgctacagcatctgcctgtatttctcacatgcttacatgaaaggcattatttattcacttggacaacaaaggctgcttttcgtgagagtcactggtcctcccatgagggcatccaccgatacttcaagaatccttcctggggccgggcacagtggctcacgcctgtaatcccagcactctgggaggctaaggggggggcggatcacgaggtcaagagatcgagaccatcctgggtaacacggtgaaacctcgtctgtactaaaaaatacaaaaaaaaaaaaattagccaggcgtggtggcgggcgcctgtagtcccagctactcaggaggctgaggcaggagaatggcgtgaacctgggaggcggagcttgcagtgagccgagattgcgccactgcactccagcctgggagacagagctagactccatctcaaaaaaaaaaaaaaaaaaaaaaaaaaaggaagaaagaaagaaagaaacaatccttcctaggacagtgaatcactcctataatcccagcactttgggaagctgaagcaagacgatcgcttaagcccaggagttcgagaccagcctgggtaacacagtaagatcccaactctacaaaagaaaatatgttttttttaattagcaaggcatgatggtgcatgcctgcagccccagctactgggggggatcacttgagcctaggaggtcaagggtgcagtgagcgatgatggtgccactgcactccagcctgggtgacagagcgagaccctatctcaaaaaagaaaaaaaaaaacaaaaaaaccagtccccacactagcagccacccataagaatataaagaaagcatggtgccctccaccaccttttacttctatacctaaccagcaattttggggggaaaagacataaatgggaaagagttctgacacatgactagctaagaaggttttgaaataaaagtaaagagtaggaattccgccaggtgcagtggctcacacctgtaatcccagcactttgggaggccgaggcaggtggatcacctgaggtcaggggttcgagaccagcccggccaacatggtgaaactccatctctactaaaaatacaaaaattagccaggagtggcggcatacacctataatcccagctactcaggaggctgaggtgggggaatcgcttcaacttgggaggcagaggttgcggtgaactgagatcaagccactgcactccagcttggacaacagagagagactccttctcaaaaaaaaaaaaaaaaaaaaaaaaagagagaaagaaaaagaaaaaaaaaaaaaaaaaaaaaatatatatatatatatatatatatatatatatatatattacaagcctatgctaattacagcagcttgggacaggagaaacagaaagacttatagaatgaaattaagaatacgctgggtgtggtggctcacgcctgtcatcccagcacgttgggaggccaaggcgggcagatcacctgaggtcaggagttcgagaccagcctggccaacatagtgaaaccccatctctaccaaaaaaatgcaaaaattagctgagcctggtggcacatgcctgtaatcccacctactcaggaggctgagacaggagcatcacttgaacctgggaggcagaggttgcagtgagcccagattgtgcaactgtactccagcctgggtgacagagtgagactacgtctcaaaaaaaaaaaaaaaaaagggtgcagtggctcacacctgtaaccccagcactttgggaggccgacgtgggtggatcacgaggtcaagagttcaagaccagcctggtcaagatggtgaaaccccgtctctactaaaaatacaaaaattagtcaggtgtggtagtgtgtgcctgtaatcccagctactcaggaggctgaggcaggagaatcacttggttccgggaggcggagtttgcagtgagccaagatagtgccactgcactccagcctaggcaacaagagtgagactccatctcaaaaaaaaaaaaaaaaaaaaagaagaataaaatgtgtgtcaccagcccccagcacatcccctccacaatagtagagtgtagggtagggctctgcctgctcatttcgccccaggaggccaaccctccctgatagtccaggatatttttggaaaaaaaaaaaaaaggtgcttttccgtctccccaagatcctcaagttcaactagacatttcctatataaatgttttgttctgcctgttcattttggtgggtgcccttttctcccttccccaccacccgtgctcctcccagtctgcccctggcctccagccctgaggatcagttgaggtagggtccctggtattccgtaccctcctccctttgtttctgttggttgtcactcctgctgaatgtattgctttttaatactgtactgcaggttttttttaaataaaattgtttggaaagtaaaagagaaaaggaataacgtgtgtgatatattgaataaaaaacacttcatagatctgtagtctagtgggggaataagaaaaagttttaaaatttttatttattttagagacagggtcctgcctctgttgcccaggctggatggagtgcagcagcacaatgatagctcactgttacctcaaactcctgggcttaagccatcctcctgcctcagcctgcccagtagctaggactaaaggtgcacaataccactcctggctaatttttttacttttaattttttttctagagacgtggtctcactatgttgcccaggctgatcttgacctcctagggtgaagtggtcctccgaccctggcctcccaaagtgctaggattacaagcatgagccactgcacccagccaaaaattatattattatttaaatttatttatttatttatttttattttattttttgagacggagtctcgctctgtcgccaggctggagtgtagtggtgcaatctcagctcactgcaacctctgcctccccagctcaagagattctcctgcctcaccctcccgagtagctgggactacaggcatccgccaccacacccagctaattttttgtatttttagtagagacggggtttcaccatgttggccaggctggtctcgatctcttgacctcatgatccacccaccttggcctcccaaagtgctgggatttcaggcctgagccaccgcgcccgcctatttattttttctgagacggagtcttgccctgtcacccaggctgcagtgcaatggcgccatctcagctcactgcaacttttaccttctgagttcaagtgattctcctgcctcagcctcctgagtagctgggattacaggcatgcaccaccacacctggctaattttttgtatttttagtagagacggggtttcactatgttggccaggctggtctcaaactcctgacctcatgatccactcacctcggcttcccaaagtgctgggattacaggcgtcagccactgcacccagcctcaaaaattattattattattttgagacagactctcagctctgttgcctaaagtggagtgcagtggtgcaatcttggctcactacaacctccacctcccaagttcaagcgattctcctgcttcagcctcctgagtagctgggattacaggtgcataccaccacacccagctaatcaaatattattttttaatccttgcaaatgtaatagcaaaaactatgaatgccccaagctagctagggcttagggaggcacggatttgtataaagtgctggtgaacttgtaaagctgaggatccacagtgagatatttctacaacatccacaccctctgatccaacacctgcaacaatgggcttggcaagtaactcatggggaaagcacctctcttggctggggcttcctcaactatggtgggagcaacacaacacaactcatcccatgagatgtggtgaagatatcagctctaggccaggcacagtggctcacacctgtaatcccagcactctgggaggccgaggtgggaggatcatgaggtcaggagatctagaccatcctggctaacacggtgaaaccccctctctactaaaaatacaaaaagaaagccgggcgtggtggcgggcacctgtagtcccagctactcaggaggctgaggcaggagagtggcatgaacccgggaggcggagcttgcagtgagctgagattgcaccattgcaccacagcctcggtgatagagcgagactctgtctcaaaaaaaaaaaaagtatcagctctagcctggccccaggtgagtccacaagggttattcttctttttttcccactatactaacaaggacgtgagggttcttttttttttttttttttttttttgagacggagtctcactctgtcacccaggctggaggagtatgaaggaactggacaacctactgtgtgcgtgggaggatccaagtccagttgtatgaaagggccagggctcttcagggaacatgtggggctccactggccacacagggcacagaaatagcaagtcacaacaactatcacttcgcagaagagaattacagtgcacggccaccaccaatgacaaacagatgctcatagtgggaccccaactgaaaaggatactgtctcagctccaggctgcagggctgacaggaagagcctcgaatgctaccaggaactctgtgaagcccagctgcctcacagcccacgtggggtgctgcctgcactgctcccttcgaaggctagttctgtctcaaagtggcccatagcctgatgaggaggctgaggcacgggagagcacagtattgtgccaaacccctactgactccaatggggacggcaccaggttcaagaggccgaagaagagactaagagccagcaaacaagatgtagggttttactgggggcttacataccggggagagtccaggggcggtgggctgggcaggagaaccacttgcaaaaagcatgcagtttatatggcattttcacttaacatcctccccctggcaaccttcatttaactgaaagcaaaaggccaggatcccttataccaccagcattccatgggacagggctaaggacccagatgttcctcaaaaataaggaatgaatctctgagattccttagctgggaactctgaaccacactcaggtgcgtctgccacacagggccattctcaggtgtgcttaagcattgctgtggggtgtgtttactatgcacacgagaagggatgggcagggtcgcagtctgcagcactgcccacggacagccctttgcatatggcgtttactgctgtggggttccttttctcaccatcatcaccccagctgtgctcccaaagttaacccatggaccaccggcctggcaccaccacaactgttccagtgtctgtagcctcaccttcagttcctactgggccgagaagccttggaggcagaggctcagcacccacacacccccacctacatctccactaggcttcgggtagcaggtccaactcctgagactgtgcagactcccattttccagaggcctctgctcccactgctccccacctacaaagcttgccccagggcctctacacgtgccgttcacagtgccagggacactcctcccccagttacctcctgcttgcccttctagcctcagtccagcaacctccaggctttgtcagattgtgtatccacagcacttcacaggggagttatccacatccactggcccagccaccgcctcagtggcccaccaaagacccacagatgagaatcagagttctcatctctctacctcagagcagctgcgaggctggccagctcctcccacacccttggcgttacacagacagggtcatcccacagggatggctgaggttctttgctgggagacagggaagaccctaaaataaggtcttcagggcactagcccctgcactcctccattgctccttcatccacgcagacatacagacttctgtgaacacatctgagtttattctgccactgctacagggcccactgtcatttccagcccactgaggttgagggtatggccaggctgggattcacacaggcccaggatgaaagggacaccgagtgtgttggggtgggggtggctggctttgatccctaccccagtgggttggccaggtgatcagagcctccaggttccctcacacacagcctggtacatttctgccgtcaggggccggaaggactgggcccggttgtccagtacaaacagagggtcaaccacgatccccacattgaagccctcacgcaccaaccgggtcttcatcagtttgaacgtgctggtgacctccatggcgtcctgcagggcagtgaccatggtccaatcactgtgacatccacccgccccctggctatgatcttccacccacccaccaggccaccctgggctcacctggatgcggatgaaatggggggtagcgtaggcagggagccaagcgcgaacgtgctggtacaacttctccccgtcgaaagtctggccgggggctagctgcacagcagccatgcccaccttaccctcacaacctagagagcagtctggtcactctcggctgacccatctcgagggcccatagctgaccctccagcctcgcccagctctgctcactggctgtgagagccagcaagtctctaaacctctctgggccctagcacttccccacctgtaaaatcagaataacgacccctccacccacaaagctgttggaagtttaaaatgagaaccctccgcacctggcacgcacacgccatacacgttaacctgttgcaagaagtccacctgcgacaacacgccctccacctcgtgcgtggacacgttctcgcccttccatctgcaaggagggagccggcgcttgtgaccacgcccccgggaaggagaggccccgcctcttgcccccgccccgccccttttggggatcaggaggcccagtcagccccgccccctcgaaaatcgagaagccccgccttcgcgtgagaagtcctgactccaagttccgccctcttacgacaggaaagtcccgcctcttcagcctgactccctctaggatctgaaagcgtccgtggccccgcgccagccccgccccgagaaaccctgcctcggaccggaaggtgtccccgaggcggtcgcggaagtagaggaagccttcgcggtccatggccagtacgtccccggtgttgtagtaaacgtcgcccgattgccgcacgttgcgcaccagcttccgttccgacagctctcgggggccgcggtagcccacgaagggttgctggcttaccaccttggtcagcagcagccccggctcccctggggtaggagcaggaacaagaacccctggagcccaccagccaagccccctgctggaggttttcaacaacggtggactcttcatcacccagcaccctgccaaggacagacccaaagacacagacagggagatccagagatgagagagacattcagagaccttgagagactgcgacaagcgacacagaaaatgagagagaagtatagagaaggcggtatggggagcccatgagaaacaggaaaaggataacaagggatggaagacggacagacaaatggcagtgagaatagatatgaccaggaccttgcaaggccctgggagaagacactaacagaaggtacaggacaagggaccaatggctggaatgccgtcttccacagaaagctcaagagaacaaatcagatggacacccagagacccagtaaatcagagcaagagatcaaggcaggggagctggacagagccgagaagctgaggcggaggccccagatggtggtaaggcaggccactggctcagggtccagatgaaggctgcagacccctctagtgagcaccaacgtcaagcttttgagcagctcgttccagccaagcagaagactgagggtcgccacccctgccacccaggaaaggctcctcaacccccatacctagccctacagggatgcagaagccctgattgtccctcacaggctccgccgcctccatgtcgaactgcaccagctcaaagggggacagcatctggggtggagggtggagtgttgacataggtcctgtgggctcagcctcagggcagctgcacaccaggtacccgcacactcactcggaggaggcagctcatcttgcccagggccccgcagcgccccacatagttgactaagcccatgttgccttctgtggagccgtagacttcccagatccgaataggaccgaagcgctgctggaaggtctcccacacatcagcccgtagtccattgcccattgccaggcggactgtatgtgtccggtcctctggttgctacaggaatgtccccagaagggtgaggaggaggtgctcttggggcatgccttggaacctttacctagagggggtgttatcctgggtccttaccttgggagttacctggaaggtgatgggggacctctacctaagggatctacctgggttacttacatgagagtagttactggagtcttaaatagagggttacctgcaggggcgacctcagagctttgcctgggggacgttaccagaggtgactggaggcctcatctggggtctcacctaagagtagttacctagaactttaatttaatggaaatttaattttaattaattaatttttaatggaaattctcatgataggggtaggggctattatccctgttttccaaatgaggacactgaggctcaaggtagcacagctatcaaagaaaccattattggaagccttgtctgaaactcattatctggggttcttgcatgaggtgtattatctgagggacttgagttcagtacctgaatctttacctgagacctttacctgggatttcatacttgggtgttcaccatggagccctaatcttagagcctcacctggggaatgttacacaagtaccgcaggagctcgcccacatacaggatcactgtcacgccatgctgccgacagtcatcccagaagcaggaagtagagaacttgggggccagaacacaggtggctcctgggagatgacaggagagggggtttcaggtcatgcttccaaattgttgtaagaagctgcttttagcacctgtgctcacccacccccacaccctgaaatacaggacaatactgagttcatctttgtgtccttggcccagccaggactgctctcactagaagagcataggcaggcctgggttcaaatcctgtctccaggatgccgggaaagctccgtgcctgttataaagtgagcaatgctaaataagggctgtaaatattaaattttttatttttatttttgagacggagtctcgctctgttgcccaggctggagtgcagtggtgcaatctccgctcactgcaacctctccctcccgggttcaagcgattctcctgcctcagctttctgagttgctgggattacaagcacccgccaccacagctggctaatttttgtacttttttaagtacagacggggtttcaccatgttggccaggctggtcttgaactcctgacctttcaggtgatccacccgcctcggcctccaaagtgctgtgattacaggcatgagcctctgtgcccagccacatttttaatttttattttggcttgtcactgactcgaagctcaaatcactcttgattacgataaatgaatgcccagctaagcagatgggtgggcaggtggatggatatggtggatggatggaaagatgaatggatggacagttagagtagtgagtgagtagatgggtgggtggacagagtagtgagtgagtagatggatgggtgaacagttagagtagtgagtgagtagatggatgggtggacagttagagtagtgagtgagtagatggatgggtgacagagtagtgagtgagtagatggatgggtgaacagttagagtagtgagtgagaagatggatgggtgaacagttagagtagtgagtgagtggatggatgggtggacagttagagtagtgagtgagtagatggatgggtggacagagtagtgagtgagaagatggatgtgtggacagttagagtagtgagtgagaagatggatgggtgaacagagtagtgagtgagtagatggatgggtgaacagttacagtagtgagtgagaagatggatgggtgaacagttagagtagtgagtgagtggatggatgggtggacagttagagtagtgagtgagtagatggatgggtggacagagtagtgagtgagaagatggatgtgtggacagagtagtgagtgagaagatggatgggtgaacagttagagtagtgagtgagtagatggatgggtggacagttagagtagtgagtgagtagatggatgggtggacagttagagtagtgagtgagtagatggatgggtggacagttagagtagtgagtgagtagatggatggctggacagttagagtagtgagtgagtagatggatgggtggacagttagagtagtgagtgagtagatggatggctggacagtgacatgcagaggcaggggggtagaaagatggataggtggctgggtgaggatcgtcacgcctgtaatcccaggacttagggaggccgaggtgggcggatcacgaggtcaggagatcaagaccatcctggctaacacggtgaaacccgtctctactgaaaatacaaaaaattagctgggcgtggtagcgggcgcctgtagtcccagctactcgggaggctgaggcaggagaatggcgtgaacctgggaggcggagcttgcagtgagccgagatagcgccactgcactccagcctgggcgacagagtgagactctgtcttaaaaaaaaaaaaaaagaaaaagagaaagatggataggtgtaaggatggatagatgggtgggtggatgaatgaatgaatgagtgaggaagtaggtgagtaggtagatgggtgggttggtgaatgtttgtatggttgtattgacgtatggacacatggattaataagatatagggggctgggcgtggtggctcacacctgttatcccaacactttgggaggctgaggggggtggatcacctgaaagatcaggagtttgagaccagcctagccaacatggtgaaaccctatctctaccaaaaaatgcaaaaattagccaggcgtggtggcgcacacctgtagtcccagctactcgggaggctgaggtggaagaatcgcttgaacccaggagggggaggctgtagtgagccgagcttacaccactgcactccagcctgggtgacagagtgagaccctgtctcaaaagaaaaagaaaaaaactgaatctaacaacacctctagttaaagtttccaatttaacaagaaatgcagatgaaaggggaacagagacctacaagcaaatacaatggggagactgtttaattgttaaaaacaaacaaacaaacaaacaaacaaaaaaacagccaattggctgggcacagtagctcacacctgtaatctcagcactttgggaggccaacgtgttcagatcacttgaggccagaagttcaagaccagactggccaacagggcgaaaccctgtctttactaaaaatacaaaaaaattagctgggcatggtggtccacacctgtaatcacaactgctcaggaggatgaggcatgagaatcgtttgaacccaggaggcagaggttgtagtgagccaacatcacacaactgtactccagcctgggtgacaaagcaagactctgtctctaaaaacaaaaccaaaccaaaacagcccattggagaaatctgaacatagactggacatcatatgatattaaggggttacatcatatgatattaaggacatcatatgatattaatgttgttacgtgtaataatcactttggttacagtttcttcagtgcttatatgttagagatatgtactgcaatatttacaagcataaagatgcagtgtctaggatttgctctgatatattctggaaaaaaatagggaagtggctgggcacggtggctcacgcctgtaatcccagcactttgggaggccgaggcaggtggatcacctgaggtcaggagtttgagaccagcctggccaacatggcgaaaccctgtctctactaaaaatacaaaaattagccgcttgtggcggtgcgtgcctgtaatcccagctattcaggaggctgaggcagaaaactgattgaaccctggggggggggggggggcgggcggggcggagcttgcggtgacccaagatggtgccactgcactccagcctgggcgacagagcgagactctgtctcaaaaacaaacaaacaaacaaaaaagaaacagggaagtacatgtgaaattaaactggccctgggcgcggtggctcatgcctgtaatcccagcactttgggaggccgaggcgggcggatcacgaggtcaggagattgagaccatcctggtgaacaccgtgaaaccctgtctctactaaaaatacaaaaaaaatagccaggcgtggtggcggtcacttgtagtcccagctactccggagacttaggcaggagaatggcatgaacccaggaggcggagcttgccgtgagcagagattgcgccactgcactccagcctgggcgacagagcgagactccatctcaaagaaaaaaaaaaaaagaaattaaactggcagcatgttaacaattattgaagctgggtgaagatacctgagatgtcatcaaactattttcacttttttttttttttttttttgagacagagtctcgctttttgcacaggctggaatgcaatggctagatctcggctcactgcaacccctgcgccccgggttcaagcgattctcctgcctcagcctccctggtagctggaaatacaggcgcccaccaccatacccagctaattttgtattttcagtagagacagggtttcaccatgttggccaggctggtctcaaactcctgacttcaggtgttccgccggcctcagcctcccaaagtgctgggattacaggcgtgagccaccatgccccggtaatttttgtattttaggtagagacggattttgccatgttagccaggctgatcttgaactcctgacctcaggtgatccaccagactcatcctcccaaagtgctgggattacaggcgtaaaccactgggcacagcctaaacttttcataattaaaaaaacaatttggccgggcgcagtggctcacgcctgtaatcccagcactttgcgaggctgaggtgggcggatcacctgaggtcgggagtttgagacaagcctgaccaacatggagaaaccccatctctactaaaaacataaaaaaaaattagccggtcgtgagggcacatgcctgtaatcccagctacttgggatgctgaggcaggagaatcgcttgaacccaggaggcagaggttgcagtgagccgacatcgcgccattgcattccatcctgggcaacaatagtgaaaccccgactcaaaaaaaaaaaaaaaaacatttggccgggcacggtagttcacacctgtaatcccagcactttgggaggccgaggcgggcggatcacgaggtcaggagttcgagaccagcctggccaacatggttaaaccctgtctctactaaaaatacaaaagttagccaggcacggtggtgggagcctgtaataacagctactagggaggctgaggcaggagaatcgctcacaagtgctcaccaccatgcctggcttttttttttttttaacagatggactctcactatgttgcccaggctggtgttgaactcctgggctcaagtgatcctcctgccttggtaccccaaagtgcagggattataggcatgaggaaccacacctggccatgataaaagtttgaaaacaaacagacgccaggcgcggtggttcacgcctgtaatcccagcactttgggaggccgaggtaggtggatcacctgaggtcaggagttcgagaccagcctggccaacatggcaaaaccccgtctctactaagaatacaaacattagccaggtgtggaggcgcatgcctgtaatcccagctactcaggaggctcagcctcagcagagaattgcttgaacccgggaggcagaggttgtggtgatctgagatggtgccactgcactccagcctgggtgacagagcgagactgtgtctcaaaaacaaacaaaaaagaaacagagaagtatatgcgaaattaaactggcaacatgttaacaattattgatgctgggcgaagatacatgagatgtcatcaaactattttcactttttttttttttttgcaagggagtttcactctttttgcaacccccgcctcccaggttgaagcgattttcctgcctcagcctcccgagtagctggaaacacaggctcgcatcaccacgcccagctaattttgtattttcagtacagacagggttttaccatgttggccaggctggtctcaaactcctgatttcaggtgatccagtggcctcagcttcccaaagtgctgggattacaggcgtgagccaccatgactggctaatttttgtattttaagtagagacagatttcactatgttgaccaggcttgtcttgaactcctgacctcaggtgatccacccgcctcagcctcccaaagtgctgggattacaggcgtgaaccaccgggcacagctaaacttttcataattaaaaaaaaaagaaaaatttggccgggcgcggtggctcatgcctgtaatcccagcactttgggaggctgaggtgggtggatcatgaggtcaggtgttggagaccagcctggccaacatggtgagaccccacctatactaaaaattcaaaaattagccgggcatagtggtgggcacctgtaataacagctactcgggatgctgaggcagaagaatcgctcacaagtgctcaccactgttgcgggaagtcagggacccctaacagacggaccggctggagccacggcagaggaacataaattgtgaagataacatggacatttatcacttcccaaataatactcttataatttcttacgcctgtcttactttcatctcttaatcctgttatcttcataagctgaggatgtacgtcacctcaggaccctgtgataattgtgttaactgtacaaattgattgtaaaatgtgtgtttgaacaatgtgaaatcagcgcacattgaaaaagaacagaatgagagtgattttagggaacaagggaagacaaccctaaggtctgactgcctgcggggctgggcaaaaagagccatatttttcttcttgcagagagcctataagtggacgtgcaagtaggagagatattgctaaattattttcctagcaaggaatattaacattaagaccctgggaaaggaattcattcctggggggaggtctataaatggccgctctgggaatgtctgtcctatgcagttgagataaggactgagatgcaccctggtctcctgcagtaccctcaggcttactagggtggggaaaaaccccgccctggtaaatttgaggtcagaccagttctctgctcttgaaccctgttttctgttgtttaagatgtttatcaagacaatatgtgcaccactgaacatagacccttatcagttctgcttttgccctttgccttgtgatctttgttggaccctgatcagtagttccgttttttgccctttgaagcatgtgatctttgtacctattctcggttcttacacccccttcccttctgaaatccttaataaaacttgctggctttgagctcaggtgggcatcatggtcctaccgatatgtgatgtcacccccggaggcccagctgtcaaattcctctctttgtactctttctctttatttctcagctggccagcacttacggaaaatagaaagaacctacatcgaggccgggcacagtggctcacacctgtaatcccagcactttgggaggccgaggtgggaggatcatgaggtcaggagattgagaccatcctggctaaatgtgaaaccccatctctactaaaaatacaaaaaattagccgggcgcggtggcaggcgcctgtagtcccagctactggggaggctgaggcaggagaatggcatgaacccaggaggcagagcttgcagtgagctgagatcgcaccactgcactccagcctgggcgacagagcgagactccatctcaaaaaaaaaaaaaaaaagaacctacattgaaatattaggggcaggttcccccgataccaccatgcgtggctttttaaaatttttttttaacagatggcctcttactatgttgcccacgctggtgttgaactcctggactcaagtgatcctcctgccttggcacccaaagtgcagggattataggcatgagcaaccacacatggccatgataatagctggaaaacacaaaaaggccgggcgtggtgggtcacacctgtaatcccagcgctttgggaggcaaatgcccgcaaatgtgggcagatcacaaggtcaggagtttgagaccagcctgaccaacatggtgaaacctagtctctagtaaaaatacaaaaattagctgggcgtggtggtgcgtgcctgtaatcccagctactcaggaggctgaggcaggaaaatcgcttgaacctggaaggcggagcttgcagtgagccgagatcatgccaccgcactccagcctgggcgacagagcgagactctgtctcaaaaaaaaaaagagagagagagagaaaatagccaggtgcggtggctcacacctgtaatctcagcactttgggaggccaaggcaggtggatcacgaggtcaggagttcaagaccagcctggccaagatggtgaaatcccgtctctactaaaactacaaaaattagccgggcgtggtggtgggcgcctgtaatcccagttactcaggaggatgaggcaggagaattgcttgaacccaggaggcagaggttgcagtgagccaagatcatgcctctgcactccagcctgggtgacaaagcaagactctgtctcgaaaaaaaataaataaataaaaattaaaataaaaaaaaaagagagaaaacaaaaagaacaagctatggagaggtccccatctagactctgaatcaagagtccagagagacagccctgtggagtgcttgagagcactcctactccagctgcccttggggccatgtcacaaatctgggccagcatccccatcatctcctgagcaccacaccttccttggatgcctgtgaccatcactcgtatcaggtcttgtcacctcctgaccaaagcatggccatcagggactgtgtgggtgtccaagcttctgtccatgcggccctggtagtcattggtgggtgtcccttctcaaaagtgagaacacagggtgctgggtaacctatggtgtctttttgccttgacagccccacgccgacacttactcccgtggtcctgtagactggagggatcctcagaagtgggcttaccgagatctaagcagccgaggatcccaacgacaagtcccatcacgtggtacagaggcaggaccgtgtaaaccacatcatcagctgtggccccagataaggacagcatcttgctcatctgcagtacccgctcatgcgtgaggatggctggcttcgggaggccttgggatgaaggcatggcaagggcagggtggtgacatgacagcacagagaggggcctgaccagagggatagatctccaacagccaggcctacattggggtttgaggctctcagagaacagtcaagtatagggatttgtggttgggttcacaggctgaatttggactgaaagtaatatgtcaagatcaaaggtttcagtggctgtttactggacacaggaagaattctggcattgacctctcaaattacattgggggtcagagttcaggccaaatatcaaaatcaagtctgggagcagtggctcacgcctgtaatcccagcattttgagaggctgagttgggcaggtcccctgaggtcaggggttagagaccagcctggctaacttggggaaaccctgtctctaccaaaaatacaaaaattagctgggcatagtggtgtgtgcctgtaatcccagctactcaggaggctgaggcaagagaattgcttgaacccaggaggtggaggttgcagtgagccgagattgcaccactgcagtccagcctaggcgacagagcgagactctgcctcgaaaaaaaaaacagccaaacaaaaaacaaatgtcaaaatcagagggtaaagtggtttcagaggtcaacactgagtcacaagtcaagtgtggggtcaggtcagcctgagagttcagaggctggtgctagggctaatgggcaccctcaccagtggtccccgaggtatagatgaagagggcagggcttctccatgtgatcccagcacgcaggtcagcaggcactgggtgggagggcgctgcatccagggcagcccccagagcccccacccctggtgtaggggaggtatggctgaggtagaagcagcggatgttctcagcctgcagcttgggaaggatctcctccaggctctcccggaggtctgcagagatgggtcagaggagaaacagaggcaaggctcacctttgaggttgcgaggcgggatctgagacccacagatgcaggcagaggagcagctagtagagaaaagcatccatgttgtttggtaaagaatcccatcattagtatttttggtcaaattgtgggaaaattaaactctgatgacctgagaactactttctgctcataagtcttgattataattgcctgtgaaagtaggcaggtggggaccaagggcctctgccagtcccagcagaacccctgtcctatagtccctgcccttgcccccttccattctccactggctccaaggccctcacctgggtccaccaccagcacccgggccccagagctcagcacagagtgcgccaggggcatcccccggccatgcgggttgatccaggctgttgggcagcccagcttggccagccccagccacatacacagggctggaacggcctgggaagccagcacaaggagggcagtaggctccccggcacacaggctcgcagggtcacccagctcagccttcagggcccatgccgcctggcaggcccgggcatccagctcaccaaaggtgactgagccggccccaggccccgtccacaccaagagtgccctgccaggctgcgctcgtgctcgccgctcgaaggcatctacaaaggtgtcaggcggctgccggctcaagcatcccctgatcttcaggcccaggtggaggatcttggccaagaagatcacatcagccggcagccagcgtagtcctgggggcagccgtgctggcaggagggttagtgccagggccgcagctgccaggctcagcccatggggcacccaggggccgagccagggccgtgctaacatggccagcccaagtagcacgcaacatgtgggatcccccaggagccagcgcagggtcaaggccacagcgactggccacactggctgccccaggccccagagcaggagcagcagcagcagcagcaaggccaactgttgcctgacacccatggtaccagctcctccctaggagcagcagctgtggagtgttcaggctcacctctggcccctcaagagtagcccaatggctcctccccaggggtggtggccctggcactgctgacagtggctggtcctctccccaggactttgcccccagcccttctcctctacgtttgtttgctctgcctggtcttgtgtgtgggtccagcccctctctgcctggcgctaaccctttccatcactggcctctgggttcccaggtctctgccccttgggcaccactagcctccttcctgctgtcctgcttgccccatccaccctccagggctggcatctaactcccttgcctcccctcccatccctgctgggtaccagacactcagagcacagaaatccctgcccttgggaacactccaatcaggccaaacagaaaagcaacaggacagcaaggtggacctcattgggaggtcctcctgtgacacccactgaaaccctgaggagaggggctcagccaggctaagccccttgtcccatgatccgaggaatcgtaccctcctgccaggcatacagcaagtgctcagtaaatacaggaacactggcatcgcctggattcaaacccagctctgccccccacccatgtgcttgctctgactctctgctccacctctggctttgacgacgatggagtcctggggttcaggagactgaagtcagcccatgatgcacacagttggatcatgaaagccctggcctctcaccttgaggaagcagtctcagaaggtgaacccagaggagctgccattggcctaggagcctggcaggtcaggctggggtatggcctggggccataccccactccaccagctccaaatccttatggcagggcacctaggctaggagccactattgtgctgaagaggagaggggcaaagagtggctgctctctccgctggatgcaggggcctgggacactggctggccagtaggggtggtgtccccaaccgcccagcagtcagccccaggatcccacccctcactgtttcctgcccccaacacggccatcggagccctccctgaactttgcccccagcaccaagggcagatatatgggggcttatataccctcagtgcaacctggccccaaagatccccctgggctccccacaagtaaggtgctcagccatgtccatcaaggtcggggaggggaagtcttaagtccaaaagacccttagagcctgactggaagatctatgggaggggccttaaaggtcgtggacagcagcaaccaggagtatgatggggctttcacgtggcctccctctcggagacccacctcagatgtggcctgcctatcctactccccacaggactgagggatccaagagaaccaagtgctggttatatatgcagcccaccttagcccctacagaatagaggtcctagatggcaaagtggaccatcctgttcctgcccaggacagcctgtgggccgcatggatgccacccaagaacagggacgctgaaccctgacactcacatcttgtctatgagggcaaggcacgcactgatccaggtgctcacagcttcgtggtttaggccccatggcctacagtcctttattagagcgagagtcccgaggcccagcccccatatatgatgggtccacttgagtctccttaggcgccccatgagggagtaacagcttgggtagagagctagggaccttgcccagcctgaccctggggcaggcaagcggccccccagcccccaccaccaccccaggagagggcggggtgagaaccggagtcaaatcttgggccgggtccaagcgcctgagcgcccggtttacgcaggaaatagtccagttctcagaagtggtctaaccagccccagccccagcccggcaccacctggagggttcaagtacatggaggagaggagtaaggcggacttaggccctggtatggagaaagggtgaagggagagagaggacctgcgctcaggagggagcgtggtctagtggcgggaaccacgggtcccgcagcgggcgtggccgactgtgcgggaggccccggatccaccgtgggcgaggccaggccccagcgccatcagggcgcagggtgcgccgccaggtggcgctccagcagcgcgcggtgcgagaagaccttgccgcaggcggggcagggcgcgcgctcgggccggtgagtgcgcatgtgcacgttgagcgagctcttctgcgtgaagcgcttggcgcagacggcgcactggaaggcgcgcacgccggtgtgcgtgaccatgtgtttgagcaggtagtcgcgtagagagaaggatcgccagcacacggcgcactggtgcggcttctcccctgcggaagacagggcgggccgcgaacgcaagtcagactctacagctccccgcccccaccccaccccacccccacctgggctcctggacctagcaggggctcccctcccctcccgaaccaccaccccgggatcccttgcctatcagagaaccctcccctcactatgggatcttcctgcccagcagggacaccccctcctctccaggacctcccttcacgttgggactttcctgcccaacagggatcctcatacactgtgaggtacccctctcccatcccttcctggcagggaccccctttctgttatcctgggatatcactgtgacagggcacccctaaatccagcaagcaccctgtctgcaaggaacccagcctgtctggaacatctgttggccatctggactgcccactgggatctccctctaccctcaggtaccctccccctcaacccctacccacccggcacagggagacactgggtcctggcccccctcgcctatgcccatagagtcccctaaactcagtctgacaaggccagtgccctttcataaggagggacctgggcacatctgccaccttcctgcaggaagccccagttgcccagaacccctgcccgctggccactataatgtccttggtgtgatagagagagctcctcattctgggttaggggaggggaggcagtctgagtccacccctagattcatcagatgttaacaaaatgcctgtctcagccaggcgtggtggctcacacctgtaatcccagcactttgggaggccaaggcaggcagatcgcttgaggccaggagttcgagaccaacgtggtgaaaccccatctctactaaaaatacaaaaaatagccgggtgtggtggtgcacgcctgtaatcccagctacttgggagactgaggcacaagaatcacttgaacccaggaggcagaggttgcagtgagccgagatcacaccactgcactccagcctgggcaacagagggagactcggtctcaaaaaaaattaaaaaaaaaaaaaccctatctcagtggcagtggactgaaaggcagtgcctgccagagggtaccccagaataacctggcccaggcacctggctcagatcacacacttcacacagccagcactaccctggggcctctggcagttccctggagactaatcacccaactcccttattcccaggcccctggcttctcccagggcagccagaggtgattttaaactgacatctcagtcactccccagcttagaacaccatggcttccccaccactcacagtcaaatcccaagttccagcccctgcagaaaccccctcactatcactgtggccttccagccaaatttttgctttttctgacaatgctcagcaggcttctgctttccattcctttgtcctccatctcagagcccccagggagcatcctcaccacattccccagtaccaccctcccactctttacctctcctgcagcactgcagagccgcctccctgacacggccaaggtccgagggaacctccccacagcttttcggggtcctctgcagctgtggagtccccacactacctatgttttcctactcatgccccagtctcaggagttcctggggccttcatcccaccacctctgagggctttctacccctgggcctgtaaacccatcctcccttgctgccagcctataacgggacagctggaaaccagagagacacaggaggctccctggagcatagtttcccaacctgccaggacctcctgccaaggctccatacccatcatgtgcatcccaggctgctcaagtttccaccaccacccttccaaaggccaggacaggctcctgcttccctacccagcctcaggatccccctccacagaagccagtgcctgctgctccacagagtggggctttcccctcccccacataccttgcacttgggggaaggctcaatttctaggccccctgctaaccaaaagtaacagaacagtgccagtgccctgtaactagtgctcaattccccctcaggtttaactctccgatgagagattgctccctctcctcccccgccctggctcacccgagtggatgaacatgtgcttggtgtagtttttccgggagctgaacgtcttgcgacagtggctgcactcatacgtaggtggctcagcacctggggtgcgagcaggggtgcctgagggggccgtggtgggagcagcagagggagccgggacctcccccagctgagtactgggggctgcctcgggctggagtgtggggtagaaggcgggtgggggcgcaggggctggccccgatggtgctgaagggggtggtgcgggtggcccaggggcacccaagtgaaaggggaagagtgcaacgggcggccctggggtcttcacaccaggcgggcgggatccagacagtatgcagtcgggctggacaggggtctcagtgggacagccttcggggacagcgccatcctcgtcgtgccaagtggatacatagctgtctggaaatacgtcctcagctgacccagctccccgaagaaaatctctcccggcaccactgtagtcagcgaggccagtgggtgcagggggctcctcgcacgcgctgtcagcagcagcagtgaggaagccagcagcacagtctgggaaggaaggaggtgcctggccctcgcctgggccgccaccttcgccatcctcgccatcggtctcatcgtcactttcctcgtcatcctcgtcacctcggtcatcaggggccgcggacagtgaggggtcagcatcaggcccctcagccttggcaggtgttgggggcgctggcagctgcaaacgcgcgggctggcgctgcttacggctgtgtgcagcaccggggtgccccgggggacgtgcagccagcaggtggcgcaggcggtgacgcagctgcgcaggtgcgagtggcgggggcacaggggtgggcaggggcgtgggcgcagaggtgcccggggctcgagcgcgggcgataatctgcgtgcattcgtcgataactgtctgtatgcgaagcactgacgcggccgtgagcacctgcagggcttcaccctgcgccacaacgagcgaaccgctgtacaggaactctaccagctgtcgcactgtctgcgcgggcaccaccggaggcacacggatctcagagtggccgagcagcagcttgtcttggaagaagggtgagccggccgccagcacgcagcggtgggcacgcagcgaagcttcacgaatgcgcacagtcacgtcacagaagtgtcccccaagcctctgcccattgagggtctcaagcagagagcgtgagaagttctgcaggtgtatgtgatgcacagcctctgcagccgccatctgcacagaacaagaggagggcagggagaggtcaactgaggacccccatctgtcccaacgtccctgtcccctcaccccttgttgcaggacagggctcgagtgcaccacactccaaggcgcgctaacccatccctccccagctgcccttcacagtccccattcccaacacaggacactccagcactccctcctccccctacctcagacctggccaggccgtctacagccccccattaacgctgcaaaccctagcacacccctaggagagggtgttggcctcaatcactgctcccgaaaaggttcaggccttggcctactctatgttgactcacccacccaccccaccccaactccaataaccctaagcctccccatgtgcccctccaagagggcagcccggtgtgtagaagaggccagggacccccatcccaactggctaacctgcctcaccccgagtagaccttgctctctacccagctagcttccactcctcctccacccctgctgacagctccttttggtttcctttagccacatccccccagtatgagaccctgtgcataggcaggattgctgcctcagaaccaggtcaccttaactagtatatacagaggctctcgcaggagtggggtggcatgacctgcttcctgggcagggtggttctgggtgtgcctagtcactaagggctgagggtaaaaggttgggcagtaccttgggagatgccccagggaaaccagtacatgctccctggcagcccctagcatagcgagcagggaggtggctcctgcagccccagcttcttgccatctcgatggggcctgtggggcccagggtgtgggtgtggcacagagaggggaagtgtggattgagcaggggtgtgtgactggatagctgcccatggagtaatcggggacacggcccaacatcaggcaccagaaaggggagggggtagtcctcagaggactctggaatctgaggagttctgctactccatccatcaagcaggtaaaccgtgatccttcggcctgtttccccttctatcaaacaagggatgagatactcggctcatcccgcacccagactgcacacacctccagtctaagggaggagggtaggagctctggactctgacatccgtataggctccaccagcctgtctctcccttggagtcacaaagccccagggtgggctcggcttgatgctgcccctacaccctcgggctctactggggtctcaagattcaacccctccgactccttatgcccaatccgccgtccctttgctcagccagacgcctcccttttttgcatgccccacatttgaccctcagaccacttcgagcacctccactgccccgttcccgctgtcctggacggatgaagaaacctggctggtgtctctgcgcccctcgcctccccttctgttccccacacggcagccagagggagcttttccagactacggatccggatacaccaccccgctccctggccctgttctgagccttctgtgcaatgcctcaaaaaagccaggcctgtgcccgcgcaaaggctaactcagcaagcagcaccgccccatctgtattcacctagcacctgaaaggattctaatctgtccggccgatggggacggaaacttgcgcatcaacccgagagacttgaaccttcctttcccgccccgccccgcgacgggctccattcctcagtcccgacgccgcaaggccggcctggacacttcagaacaaaggcctgcactcgagacccggcgcccaggccagcttcccgggtccggcgccgcacactcccgccacgccttcgccgcgccgtgtgctttactccgagcgcgttctcccatactctgctccattgcccgcgccccaccctacgcccaaagcacccctctgacccgccgctgccaccccgcactctggcccccgccgtaccccggtcctgcagcgccccctcgcgttctcagcgtgcgcttctagcggagcgcaggtgcccctcccctggcacgccccagcctcctcgcccgccctgcggcagggggatgcccattcgaccccacctccgactcctcttcaggcaccaggctctgccgtggccgcttcctcctgaccgactacaaggccgcacttccgggccgttaccccggcggaacggaggcctgcggtcgcggcggcgcaggggaaaccctaggccgaagcacgtttccggtatttttatggcgatcagctcccgccagtctgcactccggctctcctcttagtcggaaccaaagtcgaagaggctagggctgccgcgtcgcgaggaatgtctggaccagagcactcttccggcgtcgcccaggagatcaggggtgtggcgggcctgcgcgatcaatccgcaagctccctgtgatgcagaatgggaaggcagttcccggcccaagtgcccaacgtgttctggccagtttaaaccccactgcgaaccggggaagtggccttattcctgtgacacgggtgagagctgaagtaggtctcggtccctggccgccaggaggtgcaagcaagctaccactactgcagacgctccaggcccgcccgctgtgggtgggactggggaaaggaccccatctcggccttggcaccttctactacaacgcagacaggaatagacaactgcctcaccctgctctgggcctcccctgagctagaccctgtgagattctgggacattgcaagtcaatctggtatgggggacagaattccgaaaatggccccctccgagatttccgtgcccaaatccccagaacctgtaaatatgattatctcacctatgaatagttacactacatggtgaaagggtttttgcggaaataattaaggttactcattagctgatcttaaaataggatatgattctggattattttggtaggtccaaggtatcataagggtccttaaaggcagaagaggaaggtggagaaacttgaagtaggagaagggttccagaggctttgaaggtagagaggtccatgagaggaaatgcaacaggacaggtgtcatgctgagaatctgagaagagctgcaacaacagccagcaagaaaacagacctcatggcccggcgcagtggctcatgcctgtaatcccagcactttgggaggccaaggcgggtggatcacgtcaggagatcgagaccatcctgactaacacagtgaaaccccatctctactaaaaatacagaaaattagctgggcgtggtggcaggcgcctgtagtcccagctactcgggagactgaggcaggagactggcatgaacccgggaggcggagcttgaagtgagctgagatcgcgccactgcactccagcctgggcgacagaacgagactccgtctcaaaaaaaaaaaaaaaaaaaaaaaaaaaaaaaggccgggcgcggtggctcacgcctgtaatcccagcactgtgggaggccgaggcgggcggatcatgaggtcaggagatcgagaccatcctggctaacacggtgaaaccccgtctctactaaaaatacaaaaaaaaattagccgagcgcggtggcaggcgcctgtagtcccagctactcaggaggctgaggcaggagaatggcgtgaacccgggaggcggagcttgcagtgagccaagatagcgccactgcagtcgggcctgggcgaaagagcgacactcagtctcaaaaaaaaaaaaaaaaaagaaagaaagaaaagaaaacagaccttagccctagaagtgcgtggagctagattccgcccacaacctgaatgagcttggaagcaaattcttccccagagcctccagatagcagcttagtccataccacaccttgattttagcctttatgagacccacagaagacctacttgggcttctgacctatggaatggtgagctaataaatggatattgttttaacctatggagttttggtaatttgttatagtaacgatagaaaacaaatacatctggtgagatccagggcctccacacagtgagagtccaataaatgccactatttgtttcccatctgatgaacgcattcctcacatttccctcactgaaagctttatttctgtgccttcccagcttttaccaggccccttcgtgatctcattcctcagggagcagttctcacttcccctatcccagaggacagagggactcggcagtgaaagagggaaccaactgtccaaacgcatgactagaacaaagcctccagaagacagacagggtcaggatgcctgtccttcacccaggacagctactgggtgattgtgttgtagatgtggtatttggaggtcagggggaggaaaatatgtaccaggtgggaaacctcattaaaacacaagtctaggctgggcacagtggctcacacctgtaatcccagcactttgggaggccgaggcgggtggatcacctgatgtcaggagtttgagaccagcctggacaacatggtgaaaccccgtctctactttttttttttttttttctgagacaaagtctcgctcttgtcccccaggctggagcgcaatggcgcgatcttggctcactgcaacctccgcctcacaggttcaagcgattctcctgcctcagcctcctgagtagctgagattacaggcacctaccaccatgccccactaatttttgtatttttagtagagacggtgtttcaccatgttcaccaggctggtctcaaactcctgacctcaggtgatctgcctgcctcggcctcctaaagtgctgggattacaggcatgagccactgtgcccggcctgtccctactaaaaatacaaaacattagctgggcgtggtggcgggtgcccataatcccagctacttgggaggcggaggcaggagaatcgcttgaacccgggaggcagaggttatagtgagctgagatcgtaccattgcactccagcctgggcaacaagagtgaaaatccgtctcagaacaaaaaaacaacaaaaaacacacaagtctaataacctgccatcatcgtctttgttcagactcaaaccatggcctgctggacccactgggtctgctttcactgggctgagttttgggaagagcataagggtaggtgggaaaggcatgcatgaggcctctgaggagggaggacggccctcccttgggcaagacaaatgagtgaaccttgggctgagtggcaggattgcagtgtgttgagggggggaagccatgtcccattagccccattagcatgtttaaggggctgtagggaagacagtgcacctagtggggtggcaaacgcaggagtcctagcaggaaacaatagctgccctgacagcagtgaagggtagaaagggacagattcagggtaggaaggagaggacacgggtggctttagagaaagtctcagctccaagggatggggcctggaggattagggcaagataggggtggaagaccctgcccaagggctaggatgaacacaggaaggagaaaaaccaaaccctgacctctctcaagcagccaagggaggtgagagctgcagcctcaagggttattttccttttctctctaaagatcttttcacaaggctgggcgtggtggcgtctgtggtggcgtctgtaatctcataatttcagcaccttgggaggcttaggcaggtggatcacctgaggtcaggagttcgagaccaccctggccaacatggtgaaacccggtctctactaaaaatacaaaaattggccgagcacggtggctcatgcctgtaatcccagcactttgagaggctgagacaggtggatcacctgaggtcaggagttcgagaccagcctggccaatatggtgaaaaccccatctctagctgggcatggtggcgggcacctgtaatcccaacttctctggaggctgaggcaggagaatagcttgaacctgggaggcagaggttgcagtgagccagagatcagctgtcattgcactccagcctgggagacaagagcaagactccatcttttttgtttgtttgtttgttttgagatggagtctcactctgtcgcccaggctggagtgcagtggcgcaatcctggctcactgcaagctccgcctcctgggttcacgtcattctcctgcctcagcctcccgagtagctgggactacaggcgcccgccaccaggccccgctaatttttttgtattttcagtagagacggggtttcaccgtgttagccaggatatggactccatctttaaaaatatatatatatagaaaaattagctgggcgtggtagcaggggcctgtagtcccagctacttgggaggctgaagcagaagaatcccttgaacccaggaggtggaggttgcagtgagccaagatcacgccactgcactccagcctgggagactctgtctcaaaaaaaaaaaaaaaaaaaagggcttgggacggtggcttatgcctgtcatctcaggactttgggaggctgaggtgggcagatcacctgagatcaggagttccagcctagccaacatggcaaaaccccgtctccactaaaagtacaaaaattagccaggcgtggtggtggtgggcccctataatcccagctactcgggaggctgaggcaggagaataccttgaacccgggaggcggttgttgcagtgagccgagatcgcgccactgcacttcagcctgggcgacaagagcaagactccgtctcaaaataataataataataataaaaagaatgtgtatatatatgtgtgtgtgtgtgtgtgtgtgttcatatatgtgtgtgtgtgtgtgtgtgtgtgtgtgtgtgtgtgtgtatgaacccaaagaccttaaccctggttgtgggggcatttcaaggaataaatgtgtacctgagaacacaggtttgacaagctagggaggagggcgatgtggcctgcaaatattaaaaactccaggctaggccgggtgcagtggctcacacctgtaatcccagcactttgggaggccgaggcgggcggatcacgaggtcaggagatcgagaccatcctggctaacacggtgaaaccccatctctactaaaaatacaaaaaattagctgggcgtggtggcaggcgcctgtagtcccagctactcaggaggctgaggcaggagaatggcgtgaacctgggaggtggagcttgcagtgagccgagattgcgccactgcactccagcctgggcgacagagtgagactccgtctcaaaaaaaaaaaacaaaaaaacaattccaggctaagcccaaggcctgagatgggaaatggtggccattgagggaagagtctgtgagagcacagtgaccacagatgtgaaaggagcagaagaaattgagctccagggtgactgggcctcctcagctggctaaggcagggcccctctgacagcatgggtcagagaacagacagctcccaccaaggagtcttccagaacctctcggctgtgcctgattccatctcagtcaggatcccaacctccctccaccctccatcacttcccggccagcctttcatccaggctccccctctttggcagtcatactcaagtccttgtgtccacaaacccggccccatcctagtgggtttgggttgtgccaggtgtggaatacaggtcccatgatccatgcacaatggttgtgggggcatttcaagtactaaatgagtacacacaggagcaggcactaagcatatacctgcagaaatgcttcctggtttaaggcagatagcagcggaggctgaggggtggtccctggcaaggcaaatagcagcagtgaagacttgagcccttctgatgggacagagaagacatgggagccgtgtgaggtgtgaaggggcaatggcaggatcccctgtatactccagaaagtcctctgaggctgcagcttagagagaggctggagggaggcccagccccaggccctggtggagccagggaggtggtagaagcaatggctgggaccaggcaagttgccgttgggatttaccagaaaagtaacagcatccatacaggtattgagggctgttaacaaaggcaggtgggggcaaggaaaatttacaaccgagaaaagatttaatgtgctttcatatgtaaaatacaaagaagaaggtactaccagccctgtggacagaggcctgagaactccggaagaaggagacctaaattgagacaatactgaaaacaacacaactgccacaggcgctttgccagagtcccagcaccttgacctgtactgtgcccttggattaattctgaagagtttaaaaaacccaaaggctgggcgcggtggctcacgcctgtaatcccagcactttgggaggccgaggcaggcagatcacctgaggtcaagagttccagaccagcctgaccaacttaatgaaaccccctctctactaaaaatacagaaattagctgggcatggtggcacatgcctataatcccagctatttggcagatcacctgaggtcaagagttccagaccagcctgacctcccaaagtgctggggttataagcatgagccatggtgcctggactttattattattattattattgagatgcagtttggctcttgttgtccaggctggagtgcaatggcacaatcacagctcactgcaacctccacctcccgggttcaagtgattctcctgcttcagcctcctgagtagctgggattacaggcgcctgccaccatgtccagttaatttttgtatttttagtggagacggggtttcaccatgttggccaggctaatcccaaactcctgacctcaggtgatccacctgcctcagcctcccaaaatgctgggattacaggcgtgagccaccacgcctggctgttattattattattattttttttttttttttttttttttgagatggagtctcgctctgtcgcccaggctggagtgcagtggcgggatctcggctcactgcaagctccgcctcccgggttcacgccattctcctgcctcagcctcccaagtagctgggactacaggcgcccgccactacgcccggctaattttttgtatttttagtagagacggggtttcaccgttttagccgggatggtctcgatctcctgacctcgtgatccgcccgcctcggcctcccaaagtgctgggattacaggcgtgagccaccgcgcccggcctattattatttttttgagacagggtttcactctgtcgcccagcctggagtgcagcagcatgatcacggctcactgcagcctcatcctcccaggctcaagggatccttccacctcagtctcccgagaagctgggactacagttgtggcccaccacacctggccacaaaatgtgttttgagtaaagctctaaggtgaaggggaaagccccaaccccctattgtgggacacctggctggttccatcccgaaaagacacagtgaagctctagctgcatcccagaagataatacatccactgaagccaggttaaaatcattctccctttaatcaattttcctctattgcacccactgctcctcgatgccctggagcgaggaattccaccacccacagtaggtgtaagcttggcagctccagttttatggccccaggggacagtctttcacacctccagacacgaactctgccatataatttcccatgtgcacaattcagtgatttttagtcagtttattgtgttgtgtaaccttcaccactgtcctgttttagaacatctccatcacctccatgagattgctcagcccatttcctgagcgtccccacccctgtccccatgaatctgtccatggatgtgtctgcttgacatttcctatcagtggaatcacacaacatgaagtcttggtccctgccctctccagtcctgtcactttgtctcaggctcctgtgccacccgggtgttgtgaattgtctctggtcagatggttcagtgttttccactcaggagtggctagtctgagaagtgcttccctactaaggtgggcaactgaggcagaacagccacccagccttgttctcccagccgtcttcctgctggacccatggtggccaaggcctcagtccaggaggaatcaacctagacttgccacaccctgactttgtcccctccctctttacaagggctgctctccaccctgcctgctttgtgtttaagatattgggccatggctcacccctgtaatcccagcattttgggaggccgaggtaggtggatcacctgaggtcaggagtttgagaccaggctggccaacattggcaaaaccctgtctctactaaaatacaaaaattatctgggcgtggcagtacgtgcctgtaatctcagctactcggaggctgagacaggagaatcccttgtgaaagattctccctggggcctgaaagcttcgggggataaataactcctcccttctcaggcccagtcccaagatgcaaggccatttgtgccagcaacgtgcatcagcaagatagcagaagcaggaagagagctggccggaagacacatacccctgaagatggagggagagaggccctgggtaccacatagcagtaacatcagactaggacacttcctgtttacaggagactataaaactcctgccctgtccttacttgggacacccaggcgctcattaaaatagcatgttgctccacaccgcctcgtgttgtttgttggtgcgctctcggggttcaaaccgatactagagccttgcagcttgaacccaggaggcagaggttgcagtgagctgagatcgcgccactgcactccagcctggacgacagagcaagactagttctcaaaaaaaaaaaaaaagtccaggtgcggtggctcacgcctataatcccagcactttgggaggctgaggtgggcggatcacctgagatcaggagttcaagaccagcctgaccaacagggagaaaccccatctctactaaaaatacaaaattaggctgggcgcagtggctcacgcctgtaatcccagcactttgggaggccgaggtgggcggatcacgaggtcaggagatcgagaccatcctggctaatatggtgaaacactgtctctactaaaattacaaaaaattagccaggtgtggtggcatgcgcctgtagtgccagctactcaggaggctgaggcaggagaatcacctgaactcgagaggcggaggttgcagtgagctgagatcgcgccactgcactccagcctggatgacagagcgagactctgtctcaaaaaataataataataattaaaacattttaaaaagaaaaattagccaggtgtggtggcgcatgcctgtaatgccagctacttgggaggctgaggcaggagaattgcttgaacccgggaggcagaggttgcagtgagctgagatcacgccattgcactccagcctgggcaatgagagcaaaactccatctcaaaaaaaaaaaaaaaaagacattgatgagctcatcttttaacctcataaagcatcttttgaaaacaaggatggggtcggatgtggtggctcacatctgtaagcccagcactttgggaggccaaggcagggggatcgcttgatcccaggaatatgagagcagcctgagcaacatggcaaaccctgtatcaaaaaaatacaaaaaaagtttagccaggcatgatggcgtgtacccgtagtcccagctatgctggaggctgagatggcagcccgaggaggttgaggctgcagtgaagcaggatcgtaccaccgcactcagagcaagaccctatctcaataaatacacagataaccgttttaaagtgaacaacacagtgccttctagtatagtcacaatggtgtacaaccacctcctccatctaggtctaaaacaatttcctcactacaaaataaaaacttttctcccctctcctcagtccctggaaaccattaacctaaccttctgtctaaacaaatgtgctgattctggatttttttaaattatactttaagttctgtgatacatgtgcagaacgtgcagttttgtcacataggtatacacatgccatggtggtttgctgcacccatcaacccgtcatctacattaggtatttgtcctaatgctatccctcccctagacccccaccccagattctgcatattttacataaatggaaccatacaatatgtgagttttgtatctgacttctttcacttagcataaggttttcaaggttcaaccgtgttgtagcacatattagtacttcctttttatggctgaatgagaccccattatggctgggtgtggtggctcatgatgcctgtaagaccagcactttgggaagccaaggcaggtggatcacttgagcacaggagtttgagaccagcctgggcaacgttacaaaaccctgtctctacaaaaaatacaaaaattagccaagcatgatggtgcatgcctgcagtcccagctacttgggtaggctgaggcaggaggatcacttgagcctgggaggtcgaggctgcagtgagccatgatggcaccactacactccagtctgatgacagagaccttgccatgagagcgcatgcacacacacacacacacacacacacacctcagttgtatggatacaccacatttatttatccattaattaattacctaatggacatttgggttgtttctacttttagtgtttttttttgagacggaattttgctcgttgctcaggctggagtgcaatggcatgatctcggctcaccacaacctccgcctccagagttcaagcgattctcctgcctcgcctcccaagtagctgggattacaggcacgtgccaacacgcctggctaactttgtatttttagtagagatggggtttctccatgttggccaggctggtctcaaactcccgacctcaggtgatctgcccgcctcggcctcccaaagtgtggggactacaggcgtgagccaccgtgcctggccctacttttagttattatgaatagtgctgctgtgaacgttcttgcacaaggatttgtttgaacatctgttttctttcttttttttttttctttttttgagacagagtctcgctctgtcgcgcaggctggagtgcagtggcgcgatcttggatcactgcaagctccgcctcccgggttcacgccattctcctgcctcagcctcccaagtagctgggactacaggcgcccgccaccacgcctggctaattttttgtatttttagtagagatgggatttcactgtgttagccaggatggtctcgatctcccgacctcatgatccacctgccttggcttcccaaaatgctaggattacaggagtgagccaccgctcctggcctgaacacctgttttcaattcatgtgggtatataccttggaggtgaattgctggatcgtgtttaactgtttgaggaactgccaggctgtttcccatggtggctacaccattttgcattcccacagcaaagtatgaaggttctaatttctccacatcctcactctcacttgtcattttcagttatttttatagccatcctagtgggcgtgaagcagtatttcattgcggtttgatttgcatttccctgatgaacactgatgtggagcatttattggccatttgtatatgttctttgaacctcgtctccttctcctttttaaatagttgtattgatgtctaatctataagccataaaatacatacagcatttatagggtgggatcgtgtcatcaaccctaacgtggggcactgacagcctgactgtcccctgtacacttacgggttccccctacacagccatgttgacaccacaccctccatgtacctcataacataagcagataatcctgggcagtgcagggatttcattatgggttggcaaattaggctttttcaaattctagcatctaattatcagtgggcattctttggtaagcaagcaagaactggggccatgtgttcccctgaaatacggttccccttgggaaggcaggattgatgccaagttctcagagtgaggggctggcttaaaatcagcatcatatggtgacagatgggtttatttttctggatctctttttttgagaacacttaaggactcatgggtagtgtggatttattgtgcatcagccgatgacggtcactgttctttctgatgctccagctgtttgatcaggtttggcatctatgtccttttaacatatttccaccattctttgggcacctcttactttgtaatacaacaaggtgtttcaggctcagctaggactttccctgtatagtctgtccctgtacagtccttgaatcagccattttccccaggagccctggttcctattagcagggaaagggatgagactctgggctctgagtgtctcctgtcctcccccctccttcctttccctggaagctacaggatgctttgggaaggcagcaaacagaaggggcgagggcacccaccaagtccaggagtgggttgaatttgtacaggtcacaatgtggagctctgaacagtcccttctactctctgggaatgttttcccatctgtgaaattgggactgaagtaactgaaaatggcccccaatgatatatacatcctaactctgaaacctggaagtgttaccttattaggaaaaggggtatttgtaattgtgatttaggttcttgaaatggggagattacctggaattatttggtgcgccctacatgcaaattaacatgaatcgtaagagagaggcagaggagaaaataacgtaaggctacatggcacaaacaacagaagattttttctcacagttttggaagggaaagtttaaaatcaaggtgcaggcaaagtaggtttcattctgaggactctcctcttgctgtgttgggggaagctggggtggagctcttccacatatttgtcttttctttttttttgagatggagtttcgcgcttatcgccaaggctggagtgcagtgtcacaatctcagctcactgcaacctctgcctgccgggttcaagcaattctcctgcctcagcctcccgagtagttgggattacaggtgtgtgccaccatgcccagctcattgtttgtgtttttactagagacaaggtttcactatgttgggcagtctggtctcagactcctgactcaggtgatccgcccacctcggcctcccaaagtgttgggattacaggcgtgagccaccaccccggccatgtttttgagaaaaagtctcgctctgtcacccaggctggagtgcagtggcgtgaactggactcattgcaacctctgcctcccgggttcaagtgattctcctgccccagcctcccggtagctgggattacaggcatgtgccaccatgcctggctaattttgtatttttttagtagagatggggtttctccatgttgattaggctggtctcaaactcccgacctcaggtgatccacccgccttggcctcccaaagtgctgggattacaggcgtgagccaccacgtccggcctaatttttatatttttagtagagacagggtttcaccatgttggccaggctggtcttgaactcctgatctcaggcaagcctcccgccttagcctcccaaaggcattttttcttatggggcattagtcccattatggggccccactatcaggacatcatctaaccctaattatttcccataggccccatttccaaatatcatcacaatgaagattagggcttcaacatacgaattttagaggacacaattcagtccacagcaacgatgcatagaagacaaggcaatatgaagtgagaacagaggtatttgaagctgtcagccttcaagactggagtgatgcagtgacaagccgaggccaccagaaactggaagaagcaaggaaggatcctctcctggccttcagaactttgacagaataaagttttttttttttaagctgccatgtttgtggtaatatgctacaaaatccacaggaaactaacaggaatcatagtgattccaaagagcagttgagaagatctagttgaacactcatcttttgttctccattctgctcccacccattccccaactggaacctttgaaatgggaatcagatcatgccaccttctgctaaaatcttctgttagctcctcattacagttaaagaaacacccagccaaaagccacatacggtattgcccactgtagcagctgtgttaataacagcctgagcaggagggagaatgcagtcaagagaacatgtaagcaaactgaaggacattcatacaattgaccctacacaacaagggccggggaggaactaaggtcatatatggccatacaaatgtgcactgagaagccagacagagaagtaaagccccatgtgttttatgggtaggcaaagcttgtctgtgaagttagggcgtcagctacaagggacatgggcttctgagagccagagatgttctgttctttgctatcacagctggttagctgaggtgctccctgcttgcatctctacatatcataagcctccaccaaaaagttaaaaagtccatagagacagaaagtagattagtgattgtcaggggctggttggagggggactgtggagtgagtgttaatggttacagggattccttttggagtaatgaaaatgacttggaaatagatagaggtggtggctgcacaacattgtgaatgcatgaaatgccactgaatgtacacttttaaactggctaaaatgataaatttgatattatgtgaatattattattattattattattattttttgagacagaatctctatctccaggctggagtgcagtggcatgatctcagctcactgcaacctctgattccttggttcaagcaattctcctgcctcagcctcccaagtagctgggaatataggcacgtgccaccacgcccagctaattttttttttttttttttgaggcggagtctcactctgttgctcaggctggagtgcagtggcgcaatctcggctcactgcaagctccacctcccaggttcacgccattctcctgcctcagcctcccgagtacctgggactacaggtgcccgccaccacgcctggctaattttttgtatttttagtagagacagggtttcaccatgttagccaggatggtctcaatctcctgaccttgtgatccgcccacctcggcctgccaaagtgttgggattacaggcgtgagccaccgtgcccgacctaattcttttttttttcaagttggagtctcgctctgtcgcccaggctggagtgcaatggcatgatttttggctcactacaacctccgcctcctgggttcaagcaattctcatgcctcagcctcccaagaagctggaattacaggcacccgctaccacacccagctaatttttgtatttttagtagagaaggggtttcatcatattggtcaggctggtctcttggccaggctggtctcgaactcctgacctcatgatccgcccgccttggcctcccaaagtgttgggattacaggtgtgagccaccgtgcccagccttaatttttgtatttttagtacagacagggtttcaccatgttggccaggatggtcttgatgtcctgatcccgtgatccgcctgcttcagcctcccaaagtgctgtgattacaggcatgagccactgcacccggcctgtttgatttttttgaattaaaaaatgtactttaataatagacacggggccaggcacagtggctcacactggtaatcccagcactttgggaggctgaggcaggtggatcacctgagatcaggagtttgagaccagcctggccaacatggtgaaacctcgtctctactaaaaatacaaaaattatctgggcatggtggttagtgcctgtaatcccagctactcaggaggatcaggcaggagaatcactttaacctaggaggcagaggttgcagtgagcagagatcgcacctgggctcaagctatcctcctgccttggcctctcaaagtgctaggattataggcaagagccaccaggcctggccatacattgtaactcaattaccaaaaacaaacaaacaaaatttttaaagtaatagataccaaatctcatgttatggtctacaaaactggctcaagatggtcatcatcttcatccatttgcttgtcctttcacatatttgctgatgactgatccaccaagaagtgggctctgggctaagcacagtggatgcagtagtgagtacaatttggagctcatgtccttgtgattttctctagctgaaatggggaagaagagagccaagaagagagcccagagaataacattctgagtagaggcaatagcaagtacaaaggccctgagttgaggacaacaggtctcctatgtggctggaagagtgataaggtcagaagtcagaggtcagcagggccataccctagagttgtcaccagaattggatttttttttttgagatggagttttgcttttgttgcccaggctggagtgcagtgcctggccaacatggtaaaaccccctctctactaagaatacaaaaattggctgggtatgacggtgcacgcctgtaatcccagcactttgggaggccgagatgggtggatcatgaggtcaggagattgagaccatcctggctaacacggtgaaaccccgtctccactaaaaatacaaaaaaattagccgggcatggtggtgggcacctgtagtcctagctactcaggaggctgaggcaggagaatggcgtgaacccgggaggcggagtttgcagtgagccaagatcgcgccactgcactccagcctgggcgacagagggagacgccgtctcaaaaaaaaaaaaaaaaagaatacaaaaattatccgggcgtggtagtgggcacctgtaattccagctactcaggaggctaaggcaggagaatcgcttgaactcaggaggcagaggttgtagtgagccaagattgcgccactgcactccagcctgggtgacagaacgagactccatctcaaaaaaaagaaaaaagaagaaaaaagaaatttgagtgatgtagccacaatgcctcctcagaaagtggctttgggggtgacacctgagggtgggaaggagagcatgcacacgtgtggggtttggggaagagagggtgaggatggctatcttcaggtaggcgcacaaccaggcagtaggcagtcctcaggtggcctgggtgcagtctgagtgaccactgcatattgctacacctgtcttatgccctgtctgcaaagccaaaatattgacagttcacagtggtccaggactgggaagggagagacgtggtaaagtgttggcaaggagcatggaggacagaagtataagggatactgactgctctgccgggccacctggggagcggagccaaccaaggtgcactagcgtcctgccatatacttatggacctctgagtgaggtccctagtcttactctcctatatacccaccctggcttggccaatcctaggaagccccactctgctgtccctgagtcagcttgagcctgttttctagttaatctcccttccccgactggtgtcctggcacttgctgaagcctcaggttctccatgtggacaatggggccccacagtggtgtggaacctggtggggaggtgatgctccaaggtctgctgctggcattgggtaacacctgctgcttgtgtggctgcctcatactggggatgaaggtcttgggcccaggagaaggaaaaggggtgctcttacaatacctctctattgtgcagagagaagagcatggaccttgatgggccactgaaaccccaaggtgtgttgccagggcctggggagggcctgttatgaggggcagccgatgatagggtggcaggggatctaacataccccagaccctgctagctgtagagtaacctctctgagcacctcccaccactcctcactattgcctccctattgcctcagggaccttggacttgtttctgctcaactgccttcctgcaagtgtttggggcagcccctaggagagccatttccacactttgtaccatagtattaatattttgaccttctggccctggtacccttgtctaccctagaggccagaggcaggtgtgggtcctgtgtgacccacacgtccccctctcccgtgattttggggaccagtgcaggatagggctgtggaaagtgctcatcaaatattccttttttttttttttgagacagagtttcactcttgttgcccaggctggagtgcaatggccggatctcagctcactgcaacttctgcctcccaggttcaagcgattctcctgtcccagcctccggagtagctgggattacaggcccgtgccaccacgcccggctaatttttgtatttttagccgagacggggtttcatcatattggtcaggctggtggcgaactcccgacctcaggtgatccgcccacctcggcctcccaaagtgctgggattacagacgtgagccaccgttcctggccacagcaaatattcctaaaggacgcccacacctcgccctgtgcactgccagcaccaactttttttttttcttttcttttcttttcttttttttttaaagacagggcctcgctctgcagtcccaggtaggagagcaggggagcgatcatagctcactgcagccaactcctgggctcaagcgatctcaacgcgtcagcctctggcattaactttccctattatcagaggaaggaagccaggggccagggcgtcttcagggtggtgggctggagggggcgggccggctagcgaggcgtggccctatgaaggggcaggctgggcgtggaggcggtgactatgccgcggatggggtgggcccagatctggggggccgcgcgcccgggctggaacaaaggcagaggcggggacaaagccccgcggcccccagtccccatcaggaacaaaggccacacccggcccagcggtcgacgcgcccgtgctgcagccacgtgcggacacctgggagcggggcccggggaggcagtgccccgttaccctcacgccccgcccggctagccacctttacctgtgcgcgccttgggagtggcgaatgggtttcatggttgttcgcgccagtcctcgcggcctccaaacatcctccggaagctgccacctaccccgcccccagccgttgtcacctggaccggagacctcacgaccccaggggcaccgcacagggggctgaggcccacccccccggggccagcctcaatgcacccacccaccacgttttcaacgcgctgatagtccctaggcgggttcgcctctacctacagaccctgcttctccccttagacatgattcctctcccccagatcctgcgtccctcagacagagttcttctctcacacaccctgcttccctcctcagacgggattctccccccacacaccctgcttccctcctcagacaggattctccccacacacaccctgcttccctcctcagacaggattcttctcacacacaccctgcttccctcctcagacaggattctccccacacacaccctgcttccctcctcagacaggattctccccacacagaacctgcttccctcctcagacaggattctccccacacacaccctgcttccctcctcagacaggattctccccacacagaacctgcttccctcctcagacaggattctccccacacacaccctgcttccctcctcagacatgattcttctcacacacaccctgcttccctcagacaggattctccccacacacactctgcttccctcctcagacaggattctccccacacagaacctgcttccctcctcagacaggattctccccacaaacaccctgcttccctcctcagacaggattctccccacagagaccctgcttccctcctcagacaggatgctccccacacacaccctgcttccctcctcagacaggattcttctcacacacaccctgcttccctcctcagacaggattctccccacacacaccctgcttccctcctcagacaggattctccccacacacaccccacttccctcagacaggattctccccacacagaccctgcttccctcctcagacaggattttccccacacagaccctgcttccctcctcagacaggattctccccacacagaccctgcttccctcctcagacagggctcccctccccacacaccctgcttccctcctcagacagagttcccctccccacacagaccctctttccctcagacaggattttccccacacaaaccctactttcctcctcagacaggattctccccacacagactctgcttccctgagacaggattctccccacacacaccctgcttccctcctcagacaggattctccccacacacaccctgcttccctcctcagacaggattctcaccccacacaccctgcttccctcctcagacaggattctccccacacacaccctgcttccttcctcagacaggattctccccccacacaccctgcttccctcctcagacaggattctccccccacacaccctgcttccctcctcagacaggattcttctcacacacaccctgcttccctcctcatacaggattctccccacacacaccctgcttccctcctcagacaggattctccccacacagaccctgcttccctcctcagacaggattctccccccacaccctgcttccctcctcagacaggattctccccccacacaccctgcttccctcctcagacaggattctccccacacacaccctgcttccctcctcagacagggctccccccacacaccctgcttccctcctcagacaggattctccccacacagaccctacttccctcctcagacaggatgctccccccacacaccctgcttccctcctcagacaggattctccccccacacaccctgcttcccacctcagacaggattctccccccacacaccctgcttccctcctcatacaggattctccccacacacaccctgcttccctcctcagacaggattctccccccacacatcctgcttccctcctcagacaggattttccccacacaaaccctactttcctcctcagacaggattctctccacacagaccctgcttccctcagacaggattctccccacacagaccctgcttccctcctcaggcaggattctccccacacagaccctgcttccctcctcagacaggattctccccacacagaccctgcttccctcctcagacaggattctccccacacagaccctgcttccctcctcagacaggattctcaccccacacaccctgcttccctcctcagacaggattctccccacacacaccctgcttccctcctcagacaggattctccccccacacaccctgcttccctcctcagacaggatgctccccacacacaccctgcttccttcctcagacaggattctccccccacacaccctgcttccctcctcagacaggattctccccccacacaccctgcttccctcctcagacaggaagctccccccacacaccctgcttccctcctcatacaggattctccccacacacaccctgcttccctcctcagacaggattctccccacacagaccctgcttccctcctcagacaggattctccccccacaccctgcttccctcctcagacaggattctccccccacacaccctgcttccctcctcagacaggattctccccacacacaccctgcttccctcctcagacagggctccccccacacaccctgcttccctcctcagacaggattctccccccacacaccctgcttccctcctcagacaggattctctccacacacaccctgcttccctcctcagacaggattctccccacacacaccctgcttccctcctcagacaggattctccccacagagaccctgcttccctcctcagacaggattctcctcacacacaccctgcttccctcctcagacaggattctccccacacacaccctgcttccctcctcagacaggattctccccacacacaccctgcttccctcctcagacaggattctccccacacacaccccgcttccctcagacaggattctccccacacagaccctgcttccctcctcagacaggattttccccacacacaccctgcttccctcctcagacaggattctccccacacagaccctgcttccctcctcagacagggctcccctccccacacagaccctctttccctcagacaggattttccccacacaaaccctactttcctcctcagacaggattctccccacacagaccctgcttccctcagacaggattctccccacacagaccctgcttccctcctcaggcaggattctccccacacagaccctgcttccctcctcagacaggattctccccacacagaccctgcttccctcctcagacaggattctccccacacagaccctgcttccctcctcagacaggattctcaccccacacaccctgcttccctcctcagacaggattctccccacacacaccctgcttccctcctcagacaggattctccccacacagaccctgcttccctcctcagacagggattcccctccccacacagaccctctttccctcagacaggattttccccccacacaccctgcttccctcctcagacaggattctccccacatacaccctgcttccctcctcagacaggattctccccacacacaccctgcttccctcctcagacaggattctccccacacagaccctgcttccctcctcagacagggctcccctccccacacagaccctctttccctcagacaggattttccccacacacaccctactttcctcctcagacaggattctccccacacagaccctgcttccctcagacaggattctccccactcagaccctgcttccctcctcaggcaggattctccccacacagaacctgcttccctcctcagacaggattctccccacacacaccctgcttccctcctcagacaggattctccccacacacaccctgcttccctcctcagacaggattctccccacacagacgctgcttccctcctcagacaggattctccccacacagaccctgcttccctcctcagacagggttcccctccgcacacacaccctctttccctcagacaggattttccccacacaaaccctactttccacctcagacaggattctccccacatggacctgcttccttccctccttgggattccccactgttgaggttcagtttccccatctggaaaagcatcaaagtcagggtagctgctgacgaaaacatggggaggggatgccttggggggctgggtgggatttcacagactcattgctctttagcctcttgtgatttatatatatgtgtatatatatatatatattttttttcttgatggggggttggggggcccggcgtggtggctcacacctgtaattccagcactttgggaggccaaagtgggtctatcatctgacgtcgggagttcgagaccagcctggccaacgtggtgaaaccccgtctctattaaaaatacaaaaattagccaggcgtgatggcaggcccctgtaatcccagctactcgggaggctgaggcagaagaatcgcttgaacccgggaggcggaggttgcagcgagccgagatcgtgccactgcactccagcctgggcaacagagcaaaactccgtctcaaaacaaacacaaaaacctttctctcctcttttgagatggagtttcactcttttctcccaggctgtagtgcaatggcacgatctcggctcactgcaacctccgcctcccgggttcaagcgattctcctgcctcagcctcccgagtagctgggattacaggcgcctgccaccacgcccggctactttttgtacttttagtagagacggggtttcaccacgttggccaggctgctctcgaactcctgacttaagatccaaccgcctcgacctcccaaagtgctggaattacaggcgtgagccgccgcgcccggccacatttttctccatctgtggtctaggctggcgtgcagtggcacaatcccgcctcactgctgcctcggcctcctgggctaaacggagcttcccgactcgcctaagaaagtggtgggattacaggtatgagccacggcgcccggctgtgatctacatttgattcagtcaagtttctgtgtttctcaagtttaactatagcgtggttaaaatccaaaagtcagcacccgagctcacacaggagcttcctccctcttgggatggagactctcctcccctctccctggacacagcccttcactcggtcttggccccgcctacttctccatcggccctgccccctatcccgaactcttagtgacgcagaggctggagacgactctacggcggcgaagagacgcgggttgaggaagagggacggattgcccatgcgcttgggcgcacagcggcccgcttctgtgtggtctggaggtggagctgagaggggaatcacactctataaaggttcgcataccccactggcggattcaattgcggcagtgacgtcacagaggccccgccccgcccccacaagagccccaccgacgtggggttggcggtggtggaaggactaggagttggcgcgtgcgtactggcggcctctcccgcaccgaccggcctgggccccgcccccgggcgtgaggcgcccaatgcgcgtgcgcggcggcgtcggcgccagttatttctgtcccgccccccggcctcggctctttctgcgagcgggcgcgcgggcgagcggttgtgcttgtgcttgtggcgcgtggtgcgggtttcggcggcggctgaggaagaagcgcgggcggcgccttcgggaggcgagcaggcagcagttggccgtgccgtagcagcgtcccgcgcgcggcgggcagcggcccaggaggcgcgtggcggcgctcggcctcgcggcggcggcggcggcagcggcccagcagttggcggcgagcgcgtctgcgcctgcgcggcgggccccgcgcccctcctccccccctgggcgcccccggcggcgtgtgaatggcggcctccgcggcggcagcctcggcagcagcggcctcggccgcctctggcagcccgggcccgggcgagggctccgctggcggcgaaaagcgctccaccgccccttcggccgcagcctcggcctctgcctcagccgcggcgtcgtcgcccgcggggggcggcgccgaggcgctggagctgctggagcactgcggcgtgtgcagagagcgcctgcgacccgagagggagccccgcctgctgccctgtttgcactcggcctgtagtgcctgcttagggcccgcggcccccgccgccgccaacagctcgggggacggcggggcggcgggcgacggcaccggtaagtacgaagtgatcggtgccacccctccccctactctctgcctttgattccgactgggtgcagagatgaggatgccacctgggcgagaggatgggggcccggacagggcacgggaaatactttctgggtcctgcatacgaacgtgggtttgtgctggccgctgagatgggacatctgactaaagttggagaaaagaaggctcggggaggggaggggctggttcgctgcgggataatggtcgggggcccacccagcaggggaatggtgggggccataacctgggtgggaacttgtaacagtctcccacatccctgcttctcgaagtggtggactgtcccgtgtgcaagcaacagtgcttctccaaagacatcgtggagaattatttcatgcgtgatagtggcagcaaggctgccaccgacgcccaggatgcgaaccaggtgcgtcctatctcagcaaccacaaggaggtttctggggagggggcatctgcgcaggaggagcttggcaccagctccaggctgttactccactttcccaaggctctgggtgggctgcctaggttgggtcaagggaccaatcttaaatctccggttgtattttctgggatgtaaacgtggatctatcaagttgtcttgccttctctgaccctgcctttgtctggcagtgctgcactagctgtgaggataatgccccagccaccagctactgtgtggagtgctcggagcctctgtgtgagacctgtgtagaggcgcaccagcgggtgaagtacaccaaggaccatactgtgcgctctactggtacatgaggctgaggggggctgttggagttgttctcccatgtgtgccctcagttgcttttatgatgttggttgcatctggtggatgggtcctagagttctctagggggtgccgcccgaagggcccgagggcagaactccagaagcagaaaaactggggttgtggtgtgtagtctctagggcctaggtgggagagggtgggaaggggaaataagggagaccttaatgtgctgcagggaggtacaaagggtttgagaaggcttatcagggagttgtcagacctggtggtgaagggctcagcatatgcaaacagggaaaggcatggtgtgaagggctttctgggtttgtggttccctggcacacatctggtataagatgctgctagggaaagtagactgtgggtccatggattataagtgatgatgatttttggaagtgttttagcttttgagttggcagagacttacccaaagtttggtttggcatttccagcttttcacagacacagctagctttggtttggaaggagcttgagagtcttttgagtctagccaagttttggggccagaatcctcccatgagtggccttttggtagccatactgtgattcttcccatcccagaggacagcattggtggaagatagcgggaaggtggtggctgtggggcctgagcagccaggagggatacgcaggggctgcagggtgtcctacattccagacgtcccaggcaaaggtcagggtgcaggaatgagtggcattggggaagtcagtttccccaatgagccctgatgctacatattttggatttggttggtatgtgggaccagtgtgtttgatcagttttctaatggggagacaggctttggaggttattaatgggttggtctttgggtgggattatgctgagcaccaagattctgctctagagggggtgtgaccaccattctgagggtcctggtttgacatttcatctctcccagtatgagaacctctacaaggtttcctctgggcccttggattgtaagagaccctggtgttctcttgtcagggaagagggaggaagttaaccatgaaaggagaagaaaaggaatccagggtggtgtgtaggcagaattctgagtatgtccacttggagaagtgttcagtaaagggaacagtgtggggaagggtcagcgggggtggggggtggggtggggtggtcctctttttctagacgctgttatccttacccttacattgttgttatctctagaagctagaagaaagggatgtgtttctcagctatgttggggcagaggattctgggagcaaggagttgggcttgcaggcctgtgttcttccctggccacaccctctacatcttcccaataaatggcccagtgtcacagaacaggccggaaatgaggccccaactcattctgcttcctgagttgggggtggtgaagggcaaggtccagccttatgattcccactccccagggccagccaagtctcgggatggtgaacgtactgtctattgcaacgtacacaagcatgaaccccttgtgctgttttgtgagagctgtgatactctcacctgccgagactgccagctcaatgcccacaaggaccaccagtgagtcccaaggcatagtggttgggtgggtgggtgccaccccttccgtagcttagtgctcaggaacacatctgtctgctctcaggtaccagttcttagaggatgcagtgaggaaccagcgcaagctcctggcctcactggtgaagcgccttggggacaaacatgcaacattgcagaagagcaccaaggaggttcgcagctcgtaagtgtgggttctggggctgtgggggtggcccagggcagcaagaccctacctagcctgacctgctgtgtcccctagaatccgccaggtgtctgacgtacagaagcgtgtgcaagtggatgtcaagatggccatcctgcagatcatgaaggagctgaataagcggggccgtgtgctggtcaatgatgcccaggtaagccttgtgccggtgagaagggtccctgagccccctctgctgattgatgatgctgtctggggtgaggagtgatcctagtattcttctgccttctctgcttacctcatacaccttctatctgcagaaggtgactgaggggcagcaggagcgcctggagcggcagcactggaccatgaccaagatccagaagcaccaggagcacattctgcgctttgcctcttgggctctggagagtgacaacaacacagcccttttgctttctaagaagttggtgtgtactggtgggctcctggctggtgggttccaggcaggtggttcccaatacctcaaatccctatttgttgttggtgtgctcattctttcctccctttcactcccaaccagatctacttccagctgcaccgggccctcaagatgattgtggatcccgtggagccacatggcgagatgaagtttcagtgggacctcaatgcctggaccaagagtgccgaggcctttggtgggtccccagctttacctcactctgttattaccccacgtgctgcacctacttacgtttctctcttctttttgcaggcaagattgtggcagagcgtcctggcactaactcaacaggccctgcacccatggcccctccaagagccccagggcccctgagcaagcagggctctggcagcagccaggtgagcaggagagaggacccaggaaggggtgggcagggaatggggtccagtagcaggagagaggacccaggcagggggggtgggcagggaatggggtccagtagggttcctgtcccactgaggcagagggttctgctttgttcacagcccatggaggtgcaggaaggctatggctttgggtcaggtgagtgggtctgcctagtgggtggggaagggccccagtgctgtttctaccccaacctgccagtcttctttctccattttctaaggagatgatccctactcaagtgcagagccccatgtgtcaggtgtgaaacggtaagtatggcacctcccctgggggtgaggtggatggagggtgggggtgtactcatgccaggttgctgcatctacaggtcccgctcaggtgagggcgaggtgagcggccttatgcgcaaggtgccacgagtgagccttgaacgcctggacctggacctcacagctgacagccagccacccgtcttcaaggtcttcccaggcagtaccactgaggactacaaccttattgttattgaacgtggcgctgccgctgcagctaccggccagccagggactgcgcctgcaggaacccctggtgccccacccctggctggcatggccattgtcaaggtaagcctgtcccaaggaactatagctgtaggatgaagcctgtagtccaggtctggaccctgttgaacacccctcatcaccaccttgcaggaggaggagacggaggctgccattggagcccctcctactgccactgagggccctgagaccaaacctgtgcttatggctcttgcggagggtcctggtgctgagggtccccgcctggcctcacctagtggcagcaccagctcagggctggaggtggtggctcctgagggtacctcagccccaggtggtggcccgggaaccctggatgacagtgccaccatttgccgtgtctgccagaagccaggcgatctggttatgtgcaaccagtgtgagttttgtttccacctggactgtcacctgccggccctgcaggatgtaccagggtgagtgtgaggctggtgggggtcaagtctgggtgttgggctgtctggacaggatcatgtgcagacccttattttcttcaccctagggaggagtggagctgctcactctgccatgtgctccctgacctgaaggaggaggatggcagcctcagcctggatggtgcagacagcactggcgtggtggccaagctctcaccagccaaccagcgggtgagggctggggttacttaggtggggttgcccagagaggctttataggtgctgcccagagctgtgacatcccttacaatgtttgtagaaatgtgagcgtgtactgctggccctattctgtcacgaaccctgccgccccctgcatcagctggctaccgactccaccttctccctggtgagtcctaggatgggaaaggggaagggggtggtggctgctgggtctcgccctcaacctgtgcatgtatatgtgtgtctttgtgtgtgtatgtgtgatctctgcctgcaggaccagcccggtggcaccctggatctgaccctgatccgtgcccgcctccaggagaagttgtcacctccctacagctccccacaggagtttgcccaggatgtgggccgcatgttcaagcaattcaacaagttaactgaggtgagccagtggaatggagaggctgtgggcagggggagatgtgaaggaaagaactaggacccattcatccactgcattcctgcttggcccaggacaaggcagacgtgcagtccatcatcggcctgcagcgcttcttcgagacgcgcatgaacgaggccttcggtgacaccaagttctctgctgtgctggtggagcccccgccgatgagcctgcctggtgctggcctgagttcccaggagctgtctggtggccctggtgatggcccctgaggctggagcccccatggccagcccagcctggctctgttctctgtcctgtcaccccatccccactcccctggtggcctgactcccactccctggtggccccatcccccagttcctcacgatatggtttttacttctgtggatttaataaaaacttcaccagttcctcaggcgttggctggttgggggactgtggtcctggggcctggtttattgactgtatctactagtcagccttatcaagcactggtggcacaagggaggggggtcttgtcccccacctatcgaagcccatgtgtatggatgcctagggagtggggaagactgcctccttgccctttctgggtatggggagggtcacccagggcaaaggatgtacacactagaggcttgttgggtaccctgtgggatactgggtaggtgtgacctacatccctgtgtaggcagggttagccccaggtgtagcacagccactctactgaatgcttcctaaattttggtgctgtagctgtttctcatcttcagaaggtcccacagtgaactgagaccttccagatgtggtttttttccctgtctccctttgctgagtccacttaacattatcattcatctctgtgttatgatttagttactctacagtcgagcctgtgtgaatcccaaggccacccccttgcctctattggttggtctggactgtccttgagtgttgtcattaaaccatcactggaccaaacagtgttggacactacagcctggcagatgaggcctggactctcaagatcctaccagggtgtttgggcagtccagtatcttgggagaggtgatggagaagggcccacagctcacctgaagctcccagctcctgaaaatcccaggtggactttgcttgttcacccctgccccaaacccccacccttagcttagtaccaagtgcctcttgccttagtgatgcccatcctcccagggaccccagtctggtcccacatcaggccaaaagtcacatgggcctggagactagtgtcaaatctcttttattacagaggggttgtggtaaaagatcctgggcatccactggttatctcggagtggcaggggcactcagtccctccgcaggttcttaagccgttcctccaggtctgcatcagcatcagctagggctgaggctgcggcctctgcttttttcccaccagcagccacactaagcgagcccccagttgaggggaggtctgcagagaaagtgggggtttgagcaggtggggtcaggcagcggaggggagtaatgcagggaaagggagggcttggagctgtggctgggccttgggtgggaaatggggtccaggatttggagcactcactcgacagctcatctgttaggctaagtcccagctcatccagaacctgggacaccacagcatcactagggaagagagagaactcagtgagggctatgcactccgtgagggccaggcaaacatctccaccctcccatccagtttccccatacctctcctcttcatcttcctcatcacccatggcatcatcaatggcatcattcatcatctcctccttcatatccatgatctctgcctgccgctcaaactccatcatgatcttctggatctggggcaacttcagctggaagtgacaggagtgtgagtgtgatccccatgggtcgtgggagtgggaagggggattgggaaaagcgcacctgtctgttcatggtgcccatggccttggtgacacccttcatggcttgtgccatcgagttgttggacttgagtgtctggatcttgagggacacagcctggatgttggcccgcatcaatacaaacttgcgcacatagcgccgggtgcgcaccaagtcttttgccatgatgcgaacagcatcctgcagagtagacaagggtatcaaggacacaggaatgagattatcctacacttcttgacaccccattagttggttgtccctccccaccagcccaatttgcaattccacttgaagtttccagagactctggctaacccaatggtcactggtccctccctccttctgacctaaccctcctctgcctcttgggccaccaactccctgggctcctttgtaaggtcctcctcacttctcttgatctgtaaatggtaaaagaaaggccccaggctcactcctgagggttccttttccctccatgttttcagtcattcttttgacttacaacagccattcctcaatttttattcccagcctagacaaagaatctgtctcttccttcacctgatacaaacccatacctcgaactatccagaatcacatacagacctatctgaggctcagcttttgatttcctctccaaacatctttcttgcccatcccaagaaatggtatcttctctgcctacctgttcaggccaaaaccctctcacccatcaaaggctgtgttccttcttcatgctctccctactggttccggctgtctcttaccagcctcttggccatagcttatagcttacccttaccttttttttttttttgagttggagtcttgctttgttgcctaggctggagtgcagtggcacaatcttggctcactgcaaactgtgcctcccggcctcaagcgattcttctgcctcagcctctcgaatagctgggataacaagtatgcaccaccatgcccggctaatttttggtagagtggggttttgccatgttggccaggctggtctcgaaatcctgacctcaggtgatccacccacctcagcctcccaaagtgctgggattacaggcttgagccatcatgccgggccagcttatccttatagttaactggtttttttttttttttttgagacagagtctcgctctgtcacccaggctggagtgcagtggcatgatcttggctcactgtaacctccgcctcctgggttcaagagattgtcctgcctcagccctgctgagtagctgggattacaggcgtgcgccaccatgcctggctagttttttttattttcagtagagacggggttactctgtgttggtcaggctggtctcgaagtcctgacctcaggtgatccaaccacctctgcctcccaaagtgctgggattacaggtctctgagctactgcgcccggccctgtaatccctaaccttccaacttagctcccactttggcccagagttctgaattgtctggtccatgcccaactcttgaagctcacctgtcatctcccatttttttgaggctcttttttaacatttgctgctctgtctgcttaacacattccctgcccagatctgtaggctcactctcatcactcaagccttggatctcataccagttccttggaggcagccttccagaccctcaaactagggaagccctgctgacctttcactccactcgttttgctgaaagcacctgtgtttggtgtctggtctctcttgttcactgctgttagagccgtgcctgattgacagcaacctgcccgaccacccacactcaccatctggccttgcttggccatcttcttaatgtctgcaatgattttcttctcctgggtctctagtttctgtcgctcgcggtccagctcccgcatggcacggttcagggccctctggttctgccgcagtagctcctctggcgtcttccggcgcccgaacaataggtccatgatggtagaagctcactggcaggcctgagacagatgtgagtgaggcccagttgtagggcatggggcccaggagggcaagaagcagaacagggtcacgggagccttgccaaatgggaaggggctaacggagactggaggcaggaatgaggagccaaaagggagcagctgagaacactgggattgtcccggggacacataaagggggacaggtagacctgaaaattatccaagtgctggcccgagcccctccttcatcgccatgccccaaaagaagttatggcttgcaagttcagcttccctctccagaactatgggtgaggccctggagtccttgatacgactgagagcgggggatgacgcgggccggtgcactggtgttttggagactgtgggcaccgaggacagagcaattgtgggggttctgatagaggaggacaggatgggcggaaacgctaagtaccaagaacaggtgaatgtggggctgtgaagctcaggacaaggcattaggatttggggaccctgaatgctgagggagacggttgggggcgctggggcatcctgtacactgaggacgggatgatggagattcggtcgcactatacaccgaggacagtcagtgggcccggcaccaaagcaaggtggtgttggagacctcgatgttgacgacagggtcccagggagaagcgaggcaccggacacccgggcgagtagaaggcctcgtacgctgccgcccgcacgcccgcccgggatccacggtccagcaggggccactcaccggagctgggacggacacccgtttccgcttccgggtcacgcttctctttctgggatccccgacttgcccaccaactaaggcccctcggtcctgtcgccgccgccgccgtttccggattaaacgacgtgacgtaacatgccccgcccgcacccggaaggttgggaaactccaggagcgcgcgtgcgcccgtgccccggaacgggccagcgtccgagcgcatgcgcaacagctcccgtttcctctgcgcgtccgagtgtttcatgttttgagtcccgcccgagtgacccaagccagtaccggggtgggcgctttccacccaacctccacttgaggacccagcttattcgtgagaccttgacttctgcctgaggcctcagatagaaggagcctcagaaggctcctcctcctcggtgggcccacccacacaagaaaggggcaaagctagagatggcttgtttcttccactttgctggcctcttggccaggaagccacaggtcactggatcctgcctacgcttctcatcctagagtaggcttcatcccaaccaaccccaggcacagtcatggtatccccaccaactttagagctgccccaggcactgggcagcctgttgtagggtgctccaatgccacctgtgaccacaccttccaccaccccagctttgcaggccctaatggacctcagctgcccctcccaccccatagaagtaagaagcagaggccatgcagtaacattcccctttaatagcctggtgggacctccagaggtggaggggtgggttgcctgggcccagctacccaggcccgttgcccacccactccacagcccagagtgggggctgaacaagcacccagcaggggggctagacaagccaattcatttcccatcgctgagtgggtcgggggaggcagcgccgaccttaatcacatggtgttaaaaaaaaaaaaataactaggggcacgtggcaggaaggggaggcaaggccaaggcaggggattcccccaccggccgccccccaaacccctacccatggcccccaataaatatttgcaggggatgccagggcttgtggccgtggcgggggtgggtatgcgccaaccctatttcaggcagcgctcaaagtaggtggagccgatgtagccaccccgcatggagcgctgcacgttctgctcaaacagccgccggttgttctgcaggacctctgcggcctccttgttcagtgggtcctcggggttgggctcctgtggccagtacaggtagggggggtcaacaggccagagggacagaaggccaatctccccagacccaaccacctattcctactcaccaagaagagatactgcaggccataaattatggagtttatcgtaaggactggcttccagtcctctctgtggacagagagcatcagggtcagggcttggtgagtgggagactgccacaggcccctctggtgttgggcaggtcagatccagggcataggagagtgagcatgtgagaggctgggagggagggtgtggagcaggacaggccaaggagaaaaccaaggtcaggccatgaggaagatgactgggaaatcaagaaaccacagacaacaaaggggtgggaagggacagagtctgatgtagtgcccacaagaccatgagggaggcctggcaggcagcgctgaggagggcattagagggccagtgtcctcacctgaggatgttgaggcagacgttgccctcgaggtcaatgttggggtgatagaccattgtctcacacttcaccttggggggatcatgcgggtaaccctggcccacctggctccaggaaaagaaaagagagatgggtaggtgcctggaagggcctcagctgctgcctcctctgtccagggagccatccctgcccgcctgggactcaccttaaaactgaacacaaacttcccactcttgtagaagccctgggaggaaaagggggagaagaaaattttagggttccatcctgtggggcccgatgggcagaacatgtctccctcctctcagtggggacacccttggtttgctcctgggaattcagccatatgcaccctcacctcatcaggacagatgaccagcttgaagttgaggaggtcgtctggatctgagaagctgatatcacacgtcttgggcaggttcagctcgtttatgtctgggtttgggtagcagagagtcgggaacagaaagagggaggggaagagagagagagagggagccagcaggacacttagggcgggtgtttgttagcagagcccccatcgtctcctcctggacccccaggcgcctctcctgggctgtgctccacacctccagccctctccctgctccccagcttggctcttgtggatacacagcataccccaaacatgcatgttcagctgtgtatgcgtgtcccaactcctggcccagggtgacccccaacttttctgtatccacagctcccaaatgcccccactcccaaacatcctctgaccgccctaaaccccaggctccccatccatgacctccactctacagtatctacctgttcacccaaactcaaagatcctgcccacccccaccaaccctcagtcctcactgtccttcctcttctctgtctctcagacccagctttccatgtgacccccacactctcaagtccccaacccccgccaccctaccccaccccctctgactctgaggttcacagcacaatagcctaaatttcccctcacccctgtctccaatccctggtactcattaaccttccctcctccacctgtcaccccaaaccccaaattgctgtgactcaggcaggcccatgagtccctggtcctccaacctacttcacccgtttgactcagagattcccagagaccccagcataataaactaaatcctcttccactcatatccccaacccctggcctctactatccctctcttctccgcctgtcaccccaaacccaagttcccgtctaacccccagactctcgagtcgtcagttcctccactccactgcctgactctgagattccgagtccctagtagcagacaccaggccttcctaatatcctaaaccaccacataccgggcccctatctctgaccccctccccgtgactgcatgatcccaaccctcaagacttgacctccgaccccccccacgctcggggcccttcacctctgaccctcagcaaccgcattaccccttcctgactcccacatcaccctgcctcaggccctgacctccgacctccggctccaaccccatcccctgaccccctacccttctggatccgcagctgcgccgccgacgccttcttgctgctgcccttggtgccgcccgccgactcctcctccttcttctgctgcttcagcgagaacagcttgatcatcctgccgccgccgccgccgctgccgccgccgcggggcccgggaccccggccacccggccccccgccgccgcccgcgtcgcctccgctcctcggacccgcagctgcggcctcctccgctgctgccgccacccgcccggcctgccgcgccgctccgctcctctccgcgcccaccgcgcggcccgcctcggctcccgtagtccggctccggcctggcccagcgcctcggactcgctcggcagcgctcggccaaattcggctgttctcgggcccgcccggccccgcccccactgcccggggccgctccttccttgccctcgccaactctggtctcaggccccgctgcagctgcggactcggggctcccccgaccgtgccgtttggccgctcagctgatccctccgcgagggggtgcggctaggggtgggaggaggacacggcagctgcggtgacggcgggcgggtactggaggatcgtcttccgcggcagcagcggctttagcgcggaggtcggcaacggcctcgggcgccccgccgcttcggatatttccgccgcctgcccgctttggctcttcccgcccggcctgcgttgtgcgcctgcgcagccgccgcaaacccgcgttgctcagcgatggagtttggggttcggcctccttcggctggactcgggcatttccgttcatggagatgacgcttcggcggccttgcaggtcacttccggcgactttcgcggggccgggcaggaagcggagttagtcgccatctttgagtggggcagacgtgggccgcttttgctcgcggtcacttcatcttaagttgtatatatgtgcagagcgcggcgcgggtggtcacctccgctgctgccgccacccgcccggcctgcctttgaccctatgggtcacagacaaggcagggtgatcgcggcaagaccctgagtgagactagatgcgttacccagagggtgcgaggtcgagtaccttccctgtcccatcgcaaacccaaagatccccgttcctggagattctgattgaggtaaactaacaaaacatgtattgtgccagagagtggtaagcactgtggagggttacagtggtgtaggggaagacctgtcggggtggacacttggggaacgcgacgtgggggcggaatcgggccgctattggcgtgggcctcaagttccagcggacacgcactgcagcctctgcgcttcccccactatctggaaaaggggatggaggcgggggtcagcttcccatccaatcacagctcagcgtgcctcggagggcgggaggaaacggaactctgccggtcagcgacttccggccgtcaccacggaaactgccagccccgtgagcgcatggtgtggcacttgcctgcggaggggcccaggcgccactcctctgattctgcagatgctcccccaggagtggcttctggccaaggccaagccccttctttgaaactgcctttcagcctgtgttacctgcacccaagtcacccactggagggttgggggagaggggctgtgtgaaggacctggacaatgggatggaaggggaagatggctagggcaaaacaggcaatggcactgggtcctggagacgctgccctgaagcctgcagtatgctgaacttatgctctcagcatctgtccactttcacctaagctgcgtttccactggtttgctgctgaatctactcctgactgaaaccttccaatgtgcatggggccagggtgggagaagccttcagctctagcgatgggaatgatcaccacagggcagggaaactggcccagggcctgcagcctttgcttctcagactggctggggttccatctgcagggtcctacaccctcatcacctgctgcttgtgaacacgagaacaggaaagtcttgaaaaatctgaatttccaggtgaaatcttctagttttaaaactaggaaatggtttcctaggtgtaaaggagttttacaaagacatcctgaggcagaatctggatcaccaggtgtcagtttgctcctgctggatcgcataatcttggttggctagggagattctggcctgtctgggtcctttcctggggtttggcttggcccatggcccaggggacagccgtgacagggtgtggaggggagcatgcaggttgcaggcatcaagtttaggcacagtaccacccacaaacctgggggttggcagatccaagtgggatccttggctcccagctgtaagaagtgctgtgaccccactgcttccctttgttcctctagtactaagggtgagatgctgaatgtccccatgagtacaactcttcagcgggtactcctactgataggtagataaaggtagaaagctttggccgctcaggaccactttagggagtagggtgctgttagggtaagggtagctgtacagctgagctggggtgggagaggtagtatcatgggaatgaatcattaacgctgacttggagcaaggaggactggtgctcaggaggctggtaacctccctgaggattgagtgttctcccagcccttggaggccctggtctcagtgtcaagggaaaatcccatgggatttcatcaccagacaaggctgggctccagacctacccacctaggcatcactgtgcagggcagagactacaaacacctctcttcacttgcagatctgttaagggcaggctggaacaggggttggaaagggagaagagactaggccagcaccacctcttccccttggcaacagcaggtccttccaggagcaacagtttttacatacctcccagaaccaggctcactgggccccttggagacacccacaccagtgccccctcaggagtctcctaggcctatggggcaccctcttgagaacagagacctccagaccagctgagcagtaccccctcaggcccacagggcttccctgccagctaagagaccccaggactggctcagcagtgccctcttctcaggggcctgagttccagctccatgggaaactcattggagcttctaagttgcaatgcttccctttgttcctctagtcctaagggtctagctgcttcctgcaggaactttcccatttctaagacagattgacttaaccttctcactctcccatcaatcacctaacacctagttagctgtgctctgtctcttgatgggactcaatcagatcaggcatggcaccatgctatgcacatatgtactcttggtggatgctcacagagaacatttcttcctctctgggtttgagaaaccgaggtccattgcccagggagagctgaagctggactgcccagggcagttctgccccacctgctgctggtccattccctctgtaaactagaagctgggtatagcggccatcccacacgcggggtaggtgatgctaggagccacctctctcagggtgaagaggggtgttgtggaggtgaaccctcacaggaaccacgtggttacagagggagcacaccagcccagcactcggggggctggagggtggggagtgaaggacgcacaggtagggaggcactgagtgggtggagacccagtttccatctactgtttattggacacctacagtagccaagccctgggcggacctgcttatacttatgtaatcgccagcctcacaataaccaggggaggtaggtgttctgaccatggcggacacagtgcgtcccggctggagctactcggcgctgtggacgcgctggtgctgaatgagcttggtgctctggtggaagcggcggccacagtcctggcaggcgaagggcttctctcgtcggtgggtgcgcagatgctgcgtgagcgtgggccgctggcggaaggccttgccacactcagggcatgcgtagggccgttcacccgtgtggatgcgccggtgctgggtgaggttggcgtgctgccgaaagctctggccgcactcggggcaggcgaagggccgttcgcccgtgtggatgcgctggtgctcggtgagccgcgagacctgcgtgaagcccaggccgcactcaccgcagtggtagggcttttcgccggtgtgtgtcctctgatgacgcgtgagcttgaggcgctggctgaagcgctggccacactcggggcaggcaaagggtttctcgcccgtgtgtacgcggagatgctgcgtgagcgtaggccgctggcggaaggccttgccacactcggcgcaggcgaagggccgctccccggtgtggatgcgccggtgctgcgtcaggttggagcgctgccggaagctctggccgcactcggcacaggcgaagggccgctcgccactgtgcacgcgccggtgctgcagcagcactgagcggcggccgaagcgctcgccgcactcgacgcagccaaaggacttgtcgcccgtgtgtaccgcctggtgctccagcagcacggcgcgccgcgcgaagctctcgcggcactcgctgcacggaaaggggccgggaggctcgggcgcaccaggaggggccgggggcttagcgccagggcccgggggatcgccgtggatgcgctggtgctgcagcagattggagcgctgccggaagctctggccgcactcagcgcaacggaaaggctgttcgcccgtgtgcactctccgatgctcttccaggcgcgcgctgcgcacgaagccctggccacagtcgccgcacacgaacggccgctcctcggtgtgcgtaagctggtggcgcagcaggtgcgagctgcggctgaagctgcggccgcactcgctgcacacgaatggtcgctcacccgtgtggatcttctggtgcctcagcaggttgctgcgttggctgaacaccttgccacatacatcgcaacggccgcccctaaccaccccgcccccagtgctggggcggccccggctccggcccctgggggagcgccagcgggtggtgatcagagcagggcccacaccccggcagggatcctcgtccgtggggtcctgttcactcctcagatcgctggggagcagaagcgcatgcgcaaagccaccttcgcgggagggtgattggatctggccagaaaggccagccatgccgaggtcccaggggacgtggaggtgagggcttacactacctggacctgcggagatgctgcctagctgcagcgcgaaccctgcatacacaaggggaccattcattcatgacagaatgcccaccgtgccgggacccacttcatccctggggacacagtgtgaactacagggacctgaaactgaccaaagaggcagacggaggcgacaaatgcaggggtagggattctatctgtacagacttccctgatgaggtgataatgagacagaacccagcacaaggaggaagactgggctatgtgaaaaagctttctaggtctgatttaggttggaaaaaatcgtttttggaagggctgtagggcaagcgtgggggcattgtctaggtggaaaatgatggtctcagcaaatgcagggaagtgggtgggtctcggaggctggaggtggagccaacagaaagagggtgcaggctcctggatagtggtctggggtttggatgtgccttgcttgtgatgtctgtggggcatctgaggaacacagacttcatgaaggctgtggggaaacgtgagcaagggctctagggcatacacatggcacacagaacccgggcctgcaagtgatcaacacaggggtgggtatctacagaggagagaagtgggtcccagccacactgtgagcactccagcgtcagacgctgggtgaaggaggaggcaccagcaactccaactgagaatcagggcctggagaaggcggaagcctggaggaggttaaatcaagaagactgagagagcagtgagggcttttagtggtgagagaaagtccataagtcgccaaagaaaagtcagataaactagaatacatcaaaggaaatcagcaaaaaccacatcagagtcaaaagacaaatggccaaaaaacaaaaaaaattaaaaaaggacaaatggcaaaccaaaaaactctccacaggcaaaaggctaattaacctcctaagtaaagagctacaataaatcagtaagaaagatcaataacctcatagacacatgggcaaaggatgtgaacaggacaggaaatgtagctaatgcttatatcccataaaatacactccatctcctcctagtaagaaaaatgcaccttagggctgaactcatctgccatttccacaccctgactgcagggacccaagtgttcctatgtattgctggtaagcataaatgggaagacagtgtggtaaaatccatcaaaacagcaaatgtcccacactttgttcaagtaattcaatttttaggtacttcttcaacagttgtgttcctccttgtactaagtgacctacatacaaggttttcaatggtgtgtccacagtgagccacagtggggttctgtgtagctacccaaagatgtagagcacttgctgctgtgtacttaagttggaagatgcacaaaaaatgccagatgtggaacagggtggagaataagcatccatgtgtgtgttttttttttttttttttttttttttttttttttttgagactgagtcttgctgtgtcgcccaggctggagtgcagtggtgtgatctcggctcaccgcaacctctgcctcccgggttcaagcgattctgctgcttcatcttcctgagtagctgggattataggcgtgcaccaccatgcctggctaattgtttgtattttttttttttttgagacgtagttttgctcttgttgcccaggttggagtgcaatggcgtgttctctgctcactgcaaacctccatctcctgggttcaagcggttcttctgcctcagtctcccgagtagctgggattacaggcatgcaccaccacacccggctaattttgtatttttagtagagacagggtttctccatgttggtcaggctggtctcgaactcccgacctcaggtgatctgcccacttcagcctcccaaagtgctgggattgcaggcgtgagccaccgcacctagccaattttttgtatttttagtagagacatggtttcaccatgttggccaggctggtctcgatctcctgacctcatatgatccacccgcctcgccttcccaaagtgctgggattacaggtgtgagccaccacgcccagcccgtgtgtgtgtgtgcgcacttgagacggagtctcgctctgttgcccaggctggagtgtagtggcgccatctcagctcactgcaagctccgcctcccgggttcacgccattctcctgcctcagccacccgagtagatgggactacaggcgcccgccaccacgcctgactaatattttgtatttttagtagagacggggtttcgccgtgttagccaggatggtctcgatctcctgacctcgtgatccgcccgccttggcctcccaaagtgctgggattacaggcgtgacgtgccgcgccgggcccatgtgtgttttaaaggagaggaatggggctgggcacggtggctcacgcctgtaatcccagcactttgggaggccgaggcgggtggatcacgaggtcaggagatcgagaccatcctggctaacacggcgaaaccccgtctctactaaaaatacaaaatatttagccaggcgtggtggccggcgcctgtagtcccagctactcgggaggctgaggcaggagaatgtcgtgaacccgggaggcggagcttgcagtgagtcgagattgtgccactgcactccagcctgggcgacagagtgagactccgtctcaaaaaaaaaaaaagaagaggaatgggccaggcatggtggctcacgcctgtgatcccggcactttggcaggcaaaggtgggcggatcacctgaggtcgggagttccagaccagcctgaccaacatggggaaaccccgtctctactaaaaaaatacaaaattagctgggcgtggtggagcatgactgtaatctcagctacttgggaggctgaggcaggagaatggcttgaaccgggaggtggaggttgcagtgagccgagatcgcgccattgcactccagcctgggcaacaagagcgaaattccatctcaaaagaaaaaaaaaagggaatgaacatgtgtctgggaatgtctttgcttctgtatgtacagaatctttttacaaagacacataagaaacaagcagtgttggctgctggagagtaagactgtgtggcccaggcagggaaggggcattccactgtatactgtcttgtgccttttgaatttcctaacatatgaatgtattagctattcagaatagtctcctgatgaagacataaaaagacctctctgagccaggtgtggtgacttgagcctgtaattgcagctacttggaaagctgaagcaggaggatcacttgaggtcaggagttcaagaccagcctgggcaaaacagcaaaaccctgtcctttaaataaataaagcaagactccatttcataaataaatagatagatagataaacctctctggctgcaaagaaaaggcacagttttattcccaagactcttttttttttttttgagactgggtctcacccccattgcccagactggtgtgcactggcaccatctcagctcactgcagccttgacttccctggcttgggtgattctcccacctcagcctcccaagtagctgggactacaagtacgtgccaccatgcccagctagttttttgtattattttttagtagagacagggttttgccatgttgcccaggatggtctcgaactcttggactcaaacaatccacctgcctccgcctcccaaagtgctgggattacaggcatgagcggctgcgcctggctaagaagattctaaaaactcaggagttggaggtacctggtacttctggccatgcaagtgaatgagcagggcaccagccaggctggagaggctgtttcagaagcagatgctgggcagggctgctgctgtgggctctgtctgcacagaattctgagccaacagtatgcactgccatgacttacttctggatttcttctcccatcctggcagaaggctatgttaagggtgagaaaccgtactgagaaagtcagggttattaggtaaacagtcccattggatgctgagatgttaatctctttcccaaggatgctggcaggaggctgaagttaccttcttgcaggattcagacgatggaacgaaacatgcttggaggaagagtgcccccaaaatggcctagccacattgccctatggatctgtttgcagcatccactcatactcaagctgcttgctcacataccctaagaaaagggtctccttggggagtggggttcccctatgtcccttccagccagtaagccccacatctacctgctcagagctgtcagccagatttgtggtgcccctctcttgcatataagccaacaactaggagagaatagagaacacactgtttttttttaaaaagttactgctgttctcagagaaataaggaaagacattgtaaatgaaagaacaacaggagacagctaaaaagatgaacattcagagaataaaaacactcttggaaagtaaaaatatgctacaagagaccagatgaagtagctcatgcctgtaatcccagcactctgggaggctgaggtgggagcatcacttgaagccaggaatttaagaccagccctggcaacatagtgagaacctgtttctacaaaaaaataaaaaaattaaaaatgagtcaggtacagtgacacatgcctgcagtcccagatacttgggaggctgaggcgagaggatcacttgagcccaggagttcaaggttacagtaagctatgatggcaccactgtgctctagtctgtgtgaaatagtgagaccccctccccccaccaaaaaaaaagctaccagaaatgaaaatcttaacagaaggtctgaaagatacaagtgagaaaatttccaggaaaatagagtagaaagacaaaggaatggaaaattggagtgaaaagataagaacattaaaggacccatcccagatgccaatagccaagtaagaggcatcccagaaacagggagcagagcaatagaagggaaggaaataaaaaaaaatttcaaggcagtttcccagaactgagagatgtgaatttcaaactgaaaaagctcaccaacaatagtgataaaaaaaggtctgtgactgtactaataaaaagaattcttccagccaaacttcaatctaatgttgagggctagacaatgtgtttcagatatgggacatgtcagaattttatcttccacaccagaacacccacaaagctccaccaaaacaaaggtgtgaactaagaaagaggagaccctgggtctcaggaacaggaaggaacataacagaagatgggttgtaggaggagcctggatgatgccagacaaaggtggtggctgagaggtagatggcagggggcctctggtccgtaatgcttcgatgattgggcaggatccctatcctgtgtcaaggtccctcctgcccacctgctctgtctactaacctgctgtccttgtcaggtcccagccctacctgtcctgatgcctgaccagcaggatgcaagcccaggaggccatccaggataccaggactgggagagaatgtgggtacggggaatactcgccctgcttgcaaaaggttttactagggtggggagtttctagaaagtagaggggctgtgggatcagtggtagtggtgggtggctttttttgagggcagaagatgctagaggaggttgaaccttataggggatgatctagggaatgggggaacttggggatgctggagtaagagggctgcctgcgtagggccaggagtggggtcggcagagatggtgctgtccatgcggaaggcctagtcccaccacaccccatctcacttacctggggagaagatgcccccagcttcctcatgccacagggccctggggtgctccctccatgagggaccctcaggcccagtcttgctgtggggaaagatctggtccagcacggtcccacatctctgaaatcacagtggtcactgctcctctgtgcctggctgggctcagggagggacctacctgaccccacccagcaacttccagggaaaggaggagaacatggacctgggcaggacttacctgggcctcctcaggcaggagggtgggtacagactcctgggtggcagctagaggcccagactccaggaaatctagagaggaaaactggtatcaggcagcctgagtgagtttccaccccactgcccttcttagtggtgtgccaggtgctgggatgcagagaggtgggattcttggttgtgggcttgggttggggagggcagtgcagggtagctgagggcccagctcaggggctgggtgaagcagagtaccctggaaggccaggggttgagctgcagtgggatgagatgggctgaggtttgtgcccctgtagccgtatgtgaaccatggggcaaggtggtcagcgggggtcagaggtattgtacaagggtccacataggaatggcagggtgtgagcagctagttcaggtgccctgcctgggaggtgaaaggggtcatacccctaacactacgaggtcctccctcagcagctcctaattatacctctgcctgctgtctgttccccagtgacaagcacatattgcctaacgcatctccttggggactgaacaccacatgccatctgtactgggaaaccccaacagcctgctccatgccatggggttcgtgggtacagggctgtggcagtcaggcttggtgtgtgaggggtagtgacagcactggctgcggtggaggggagacctgactgggtagaatgtgggggctgctggcagatggaaaccattccatttataacaaacctggcccagtggacttcagactgactgctcaggccaggttccctggcccacccaaccagaccttaggcgcgcccaccgtgcatgccctcacctgagtcctctgtaacctctgactcctctttcacctgcaggcccagtggtgattcctgcatagtcctaggaggtgtcttgggcccaggctctggagttggaggctcagtttcaggtaggggctggaaactggagggctccatcttctctgataggacctcctggccctgcacctggactgtgacctggggaggtgcccccaccatcagaagtcctaccagagagtaaggctggccgcaacctggggtttgtgggtgcccatcccactgtaggatcccaggggcctgccttgtaaatacctactgactaggtcctccaaggacctacctcccctaggccctgagcaaagaatgaagggaccacctgcagtccctcccctgctctgacatcgtggccttccagtaccttccccatattcccctagcctgcagctcctatgtccacgtgactgcaggtgatgcaggaatgggctggggagtctggccctggaatccctctgccctgggcagccttgcacagggtctctgttgcaggtggccacttctgtaccacaagggagaacgtgtgtctggcaaagcgtggtgctgcccagggtgaggccgagctggatgatgctccagtcctgaaccccactcgtggacactcactcacccatctccggggtccgcccggctcccggcgcagcccatctactagggcagcagcctcctcggggctgcctggccgctgcccctgcacacgggcctggatctcagggggcagtgcgcccaggaactgctccagcaccaacagctccagcatctgctccttggagcgtacctctggacgcagccactggcgacacagctctcggagctgggccagggcctcttggggccctgtggcctcctcatagcggaagcaccggaaacgcaggcgtgcagcttcagggcctgggtcccataaggcagcctcaccctcctcctcagagtcctctagcttcaccatgacaggcccctcatcttctgggggtgctcggtctggggagcccagcaccgcaggcctcatagagggtaccaggtcaggtatctgaggccagtgtctgcccctggtgaagaaataggatgaggctgttgcaaaaggagtacagtgaatgcttcactgcctagtctatgctgtaccgtttgatcctcagacctaccccatgtggaaggcagatgaggaaacaggcaaagaaaggccatctacaacccacagacttatgcagctggaagccctcccttagccacctgtatccctggtcttctctccgcttgggcctgtgcaaagtctctgacagtctccctgctccaaacacaggcttttttttcttttctttgagacatgctgtcagtcagttgcccaggctgaagtgcagtggcgagatcatgcgtcactgcagacttgacctcccgggctccagagatcggcctcccaagtagctgagacaacaggtgtgtgccacgacatccggctaatttcttaatttttctgtagggatgggatcttactatgttgcctaggctgttcttgaactcctgggctcaagcagatgatcctcttaccttgacctcccgaagtgctgggacttacaggtttgttccaccatgccagcccacaggctgttttttaggactagaagacacttctctcccctgtatccttcccttcttctacatgtgcaacctcattcctgcgctacagctctctctttaccaggtggatggcacctatacacctacagcctgggcatcagcatcactgctggcgtctccccctacccaacgccagcccttacttcaccttctattctctcatctacttcgatgtggctcctcatttgggccccaccatcattcccctccctgcttggaagcctcactccacctaatcctccatgtcaacctgtgcagtcacttgtatggctcagctcccaggcagcaccctctctccctactcagccccatcttctaagcccaacatcacactacgcaatgccccatctcagcttcctgatttagctggggttggaaggggatgggggagcttcgcaatgggtgggggggcggcaaaggctccaagactgccggaacaggagcctgcaaggaagtcccgagactctgattccgcccatcttcagatcactgtgccttcgagaacttgtttccccatttgcaagtggggctgacctccctcctcgcgctgttccttctgcagctgcggctttaggaaggaatctgcgtttatgaaggggatggcaccgcagaatcattcccccgtgggtggcatcgatttcgagggccgcctcatcctgggggccaagcctccactcttcaaggtgccaagtcaacctgaaaccctgggagagacttgggtcatagccaagatggcaggtacctacggagggtcccgaaatacacttcccagaagtccaggcggcaacttccgctccagggtgccaaggtaggtccagacgacgcctaggcaaccgggggcggggctcccaaagcctgtcgtcgtggcaacgagtagtgattgacaagcctctcgctctagccctgggcgctcccgcaaggactgcccggattcgttccccgcgcttccggtctcactggggagccggaatccccgagtctgcagccaccgcccccgtccacacgatagccctcccggttaagaggaccccgccctcacctctgcgctcagcgggccgctccgcgctcctgagcacgcgcagtcttcgacttccccctcccgctggactacgtctcccaggatgctccgcgcaccagctcgagcgcctccttgcccttcccccaccctcgtccccgtttctacaccctctcctcccttcccctagcggtggtcgcaatgatcaggtcatactcctggccgcttcttcccatgctccccgcctcgaatccgtgcgtcggcatgcgcaagcctctcaggtacaacagacggcagcaccgcctaccagatcgcgcatgccccccaccacgttttcctcacttctctacgggccttcctgagattagcaggatcctgcaccaatcacggccgtcattagaactccgtcggtgccccaccgcgtctccatggcaactccctacaggaaggggcctctgctacttcctagaccgcaaaatggagaaaggcttggcccgatgctttccggcagatgtagtcagcaggcccttcgtgtgtacgtgcgcgcgcggcgcgatgacgttcctctgtgatcatgggcgaggggcgggccctgaacgtctccatggtaacctggggacacgactcgacatcgcctgggtaacccggagacgcggcgggcgttgaaaatgcaatggggcatgtgggatgaagaggtggggaagggtactggggcagagagatgccgatcgatagaaacagcgaggagagacggagagagaccagagactcaagggcaaagagagacgaaggaccggcgggaggaagagagagagagacagagagacagactcacagactgggaggaccggagactcgacgcgaggagagacagtgaaaataagtgaacaaacatagagacacgggtccaagttataagagggctgagtggatcagagggtcagggccgggcaaacaggtgtcagaacagttagcaagagagaggcagatcagaaagggatgcagatgaaagagacacaaagaaggaaacgcagaatgggttcacagagacaagaaatgcagatatccagactcaagaggtagacaagaagggagagggacagaaacaagaagggagaaaagggacagaaattagagatacagtaagatggattgacagttttcgaagacctagagaaagatgacagcacgaagagagacagggagaatccgaggtaaaactgttaggaaaacttaggagtccagatgctgtccagttatatgctaccctgtacaggttgataggttgcaaatgctttctgtccagtgtatcgctttgtagctcactaagcagttttgtatccaactttgtgcttttatttcagtgtttttctttttctttctttcttttttttttttttttttttgacggagtctcgctgttgccagactggagtgcagtggcacgatctcggctcactgcaacctccgtctcccaggttcaagcgattctcctgcctcagcctcccgagtagctgggactgcaggctgctccaccacacccggctgatttttgtatttttagtagagatggggttttaccatgttggccagactggtcttgacctccagacctctggtgatccgcccacctcggcctcccaaattgctggaattacaggtgtgagccaccgcggccggccagtgtttattcttcctttcctgtcttcctagaatcatcttgctgcttccctcagtacggtaaataaatcttttgacacatgctcactgagagtcatgtttttaactgttttgaaattatatttggcagtctgaagggaacctgttctccgggctaggggacaaacagggaaaaagaaaatagtggccgggcgcggtggctcacgcctgtaatcctagcactttgggaggccgaggcgggcggatcacgaggtcaggagatcgagaccatcccggctaaaacggtgaaaccccgtctctactaaaaatacaaaaaattagccgggcgtagtggcgggcgcctgtagtcccagctacttgggaggctgaggcaggagaatggcgtgaacccgggaggcggagcttgcagtgagccgagatcccgccactgcactccagcctgggcgacagagcgagactccgtctcaaaaaaaaaaaaaaaaaaaaaaaaaaagaaaatagtgacacatacccaggaaaggaaggaggaagggagggtgatgtaagacaaagacattaggcggcgagaaagccagcctttggtcagaagcagcttctggcgcccctggctggactctgtgcggtgcggcctcgttgccaaactacattttccggcagtacccgggacgccgggcgcagagcggagagcgtcgcaaggggcgggcctgacgcagcctcctccctgcccggccgtcgccaggcaaccttcccccttcgcggccgagatggaccctgggctcggcgtcctccggaaaactgcactgtgaggcggggcgatggggaagggccgaagccccgccagcccagctaaagcagacggctcgcactgcgacccgaaggtgaggttgatcggccgcgctggggccccggcttcggggcaggagctgcagcccctcctcttggttcggtcggggaactgggatatgaggccactgtgtccgcagctggcacgcacccgagtgggccaatcggagccttcggcggccccacggctctctgggaaatgtagacccgctacacgggacggtacccgcctaagaccatactgcgcaggtgctgatctgagtctgggtccctcctgggtcgaggagttctttggcccagatctgcgtggaggcgtgttcgcccggccctaaggtcccttgcgggccttctcggcctcacagcgcgtgtccgctgttcgttccccttccctcctctgtcttggaaatgtagtctcgagggaggagcttggtcatccacccagacttcgtgaggcccccgggcttggggctgcctgttgagagtgggagggagagaatgtgtgaatgtgtggatgaattaatttgcaattatgggagcgcaggcgaaggtgtgaatgtgggagagagaaggatgggcccaagagtggttcagatttcggggctttccccgatttcaaagcttgagtttgagccttccccatgtccacccgcctttccctgtcactctagctgagggccctgtgtgctgtgcctccttgtttcaaggcaggtgcatggtccatggaggtactcatcataggtgtagtcattccacaaagaacggtcaggcggcatttgttccttttttccttccttcctccctccctccctccctccctccctccctcccttcttccctccctcccttcctccctctcttccttccttccttcctccctctcttccttcctccctcccttcctcctttcctcccttcctcctttcctcccttccttcctttccttccttcgttcctgtcttttttccttctttccttccctccctccttccttccttccttcctttccttcccttcctttcttctatcttttttttttttttttttttgagatgggagtcttgctctgtcgcccaggctggagtgcagtggcgcaatctcggctcactgcaacctccgcctcccgggttcaaccaattctcctgcctcagccccaccgagtagctgggattacaggcacacgccaccatgcccaactgattattattattattattattatttattattatttttttgagatggagtcttgctcttgtcgcccaggctggagtgcaatggcaggatctggcctcactgcagcctctgcctccctggttcaagcgattctcctgcctcagcctcccaagtagctggaattacaggcgcacgccaccatgcccggataatttttgtattattattattactattttttttgagacgaagtcttgctcttgtcgcccaggctggagtgcagtggcagaatcttggctcgctgcagcctctgcctcgcctccctggttcaagcaattctcctgcctcagcctcccgagtagctgggattacaggcacccactaccatgcctggctaatttttgtatttttaatacagacatggtttcgccatgttggccaggctggtctggaactcctgacctcgtgatccgcctgcctccacctcccaaagtgctgggattacaggcgtgagccactgtgcctggcctgttcctgtttttcacaagcacagtttttaaaaaaaatttttactgttttgaccaggtgttacattcacatggttcaaagtgtaaaagagacaaggtgagacagacgcacaataaataaataaataacggtgggggacggcccctgtctcataaggttgtgtttgaaaagaactgcagaaggtgaggggaaaaagccatgcagataacagggaagagtgcctgctctgggccaaaggaaccataggaacaaaagtccctttgtagctggcacagtggctcacgcctgtaatcccaacactttgggaggccgagacaggtggatcacttgaggtcaggagtttgagaccagcttggccaacattggtaaaaccctgtctctactgaaaatacaaaaatcagctgggcatggtggcacacaccagtagtcctagcacctgggaagctgaggcaggagaattgcttgaacctgggaggcagaggttgcagtgagccaagactgtgccattgcattccagcctgggcggcagagcgagactctgtctcaacaaacaaacaaaacaaaaaaagcccctttgctctgtctggaagatgtggtcaggagtgagcagagtagaggaggaggctttgagtcttacaaaggaggcagtgaggactgtggcttttacttgaaggcctgggagggctccaacagaggtcaggatctgacttagtttcactgaatcattcttgatctggtatggagaaccatcatccccttctatcattgggtactccacggtggtggtaccaattagggacggccctgcaggatgtacctgggtgtcctgccacctgccatctgtgtctgggtggagccccagtgccctgagagcagtgaggaggctatggcgctggtggaggacttcacccagatgttgaagactggtgagccacaggggtccaggggttggccagagggataggggaatctatgagggatcacagctcatgaccttgggccctgagtgtctccctccgtctgcctaggccctcaatatccctgtcttggggaggaggacctagaagctgtgacgcatttggagacttctgcagcctctgagccccccaaaggcatgagcttgaggttgatgtgacttctcctctcttggggtagaccaggcttcctttcccatccttctttccttccccgcaaggtcactaagtgcctgccatatgccaggccctattggtccagcagggaaagacacttggcattcatggagcctagtctggttggagaaatggaccatgagaccatcagtcacaatttaggtatcctttccctgaaggaggtgggggaagaggaggtgagcacagagactggcctggcagggagcagctttgtagttttcagtgtctaacatcttcactgtgagcttgggttccacacgtgtgtatgcgtttgtgcttgggagggggtgacaactacaagatatgagagaagggtggttacagccaccattcatcctggcatttgttcctctgttcactcgattgctcatgcatgactgtgcagtgtcttctgcctacgcgattctctgtcaggaggtagaaactatatcacctttttttaaaagcacacctttaccaagttataattgacataccaaaaaagtatacaattcaggtatttttagtatattcacaaggttgtacagctatcaccaccatttaataccagaatgtaatcacaaccaaaagaaaccccatgcccattagtagtcacccatcagccccctcctctaagctcccggcaatcactaatctgctttgtgtctctatggatttgcttattctggacatttcattaaatggaatcatactttatgtggccttttatgtctggcttctctcagagcataatgttttcgaggttcacccatgttttaacatgtcagaacttcatttttatgagcaagtgatattccattgtatggatatgacccattttgtttattcatgtattctttgatcagcatttggcttgtatttacttttcggctattatgaataatgctgctatggatgttcatgtacatgtttttgtttggatgtttgtttttatttctcttggttgtatacctagaagtggaattgctgggtcatatgataacactatttgaccttttgaggaactgctaacacaccacttgttttaacagagggaaattaaggtaaaaaatgttaccgagatattgaaggagtaaaaaagtacaaaaagaaccctaagatgtcatgttggtaggaacttcagggaacaacatccattcctagagctttatgaacaaagggaagaggttgggtttagtctttgagagaagctcaaaggaggggaacgtggtggtgggggcactgggatccagatccctggggaggtgttgctgcgggctgacgctggggtctccacagagccttcatgaagctgattctacacatactggaatagctgcaagctggtttcagctactgctaaggggattgaaagccttgcttttgcaggactggtttttccttacacatgaatatgaggggcgggggagacatcttggatgcatatatctatagtcactgtggggtgttgtttttttttttctgtagtgctgggctctattttctttccttccttccttccttcctttccttccttccttccttccttccttccttccttccttccttccttcctcccttccttccctctttctttctttctttgatggagttttgctcttgttgctcaggctggaatgcaatggtacaatctcgcctcactgcaacctccacttcccgggtttaaccgattctcctgcctcagctcccaagtagctaggattacaggcatgtaccatcacacctggcttattttatatttttagtagagacagggtttctccatgttggtcaggctggtctcgaactcctgaacttgggtgatccgcctgcctttgcctcccaaagtgctaggattacaggcatgagccactgcacccagccatgggctctgttttctaagcatgtccaccagcatttgaggcatagtgtctcctgaacaatagctagcatatgcctgctctttaaggactagcccccagttctggttcccagtgtcccattgaacagatgcctagataatatgcactctaaatagggattttgggctgggtacgatggctcacgcctgtaatcctagcactttgggaggctgaggtaggtggatcacctgcggtcaggagttcaagaccagcctggcctatatggtgaaaccctgtctctactaaaaatacaaaaattagccaggcattgctgggcgcggtggcttgcgcctgtaatcccagcaatttgggaggctgaggcgggcgtatcacctgaggtcgggagttcgagaccagcctggccaacatggtgaaaccccatctctacttaaaatacaaaaattagccgggcgtggtggtacgcaccaataatcccagctactcgggaggctgaggcaggagaaatcacttgaacccgggaggcagaggttgcagtgagccgagattgccccattgcactccagcctgggggacaagagcgagacttcatctaaaaataaacaaaaattagccaggcatggtggcgggcgcctataattccagctactcggaaggctgaggggggagaagttagggttagggttaggctgaggggggtgatttggaaacccgatgttcagtgtgaggggcagggaaagcttataaagtcctagtgtgtttacagaagcttgctgcattcctgagagtgaagttagtttagtgtatggggcaaacatccactgggaagtgagccctgtgaccctaatatggcccgaatctgctccttaaagagagagacttggtaaattatctttaccaggtgttacccaagcctgtcagcactccccaccagtaagccttgtgtcctcattttacagcgcgagtcatggctggggccttagtggcaacaagtgctgagatcagcgggctcagtagcaggaacacaagcacccccttgcggtgtctggaggaagcggcgcggacagtctcccgctccaccgtgtcgggcctgaagaggccgctgaacgctcgcgattactgaggcatctggtaggatcgcaaggccatcaacctacaggtgaagctcgaggcgctgtggcgctttgaagccggagagaagctcagtagaatcgggaaggcgctggggctgtccaactccaccttggccaccattcgtgacaacaaggaaaagatctgggcgagttcccaggaggccacactgcaggcggccaccaagttgacgcgtggccgcagcctggtgatggagaacatggagcagctgctgagcatgcggatggaggaccagagccagcgcaacatgcccctcagtgtggtgctcattcgggagaaagcccacagcccgttcgagaaccgcaagcaggagcagggcgagggcgcctagcccgagagcttcggggccggtcgagggtgattcgctggctttaaggcgcgccacagcttgagcagcatcggggccagcggcccaagaacgcagcgtgcaagaatccagcgttaatgcgcagggtgatcccggagggcggctacacactctggctggtgttcaccatgaataagctctggctggtgttcaccatgaataagcccaggttcctctgtaagcgcctgccgagaggacgttcattttcctgtggaagatgagtcggcccctgggtcaaagccgccggagacctcctgaccctattgctcggtggcaacgcagccggcgacttcaagctgaaggccctgctggggtacccctcggagaacccgtgtttcctcaagggctccttcaagcccaacctgcccttggtgtggtgctcgcacaagaaagcctgggtacagcctgggtgacagagcgagactccgtctcaaaaaaaaaaaaaaaagcctgggtaaccatgagcctcttccaggagtggttcctgcacttctgctctacagtggagggcgctgcacccagtacgaccttccctacaaggggctgcccatcctggacagcactcccggccaccctgggtgttgagacagagtctggctctgtcgcgcaggctggagtgcggtggcgcgatctcggctcactgcaacctccgcctcccgggttcacgccattctcctgcctcagcctcccaggtagctgggactacaggcgcccgccaccacgcccggctaatttttttgtatttttagtagagacggggtttcaccgtgttagccagaatggtctcggtctcctgaccccatgatccacccgccttggcgtcccaaagtgctgggattacaggcgtgagccatggtgcctggccctttaattcccccaatatttttttatctgcattaatttattatttcaagtgaacttccatctcaaatacatggttctcagacgcttccatgaactctcaagtgtgacttattacagcctggggctccttggagcacagtgtgccagtgacctagtggaaggccatgagaaagccaggttcactgttcactgtgcagcatctccctccatggtcttcctggagcctattcccactgcactgagcattccgtgtgtccagaggtagggttagcagggatagatggacttcctgcttattttctgttcacatttccactgaccttcaatcctgtagactgcaaagattgagccagctgagcccccaaagagactcagcagtgcagaatgtgggcctgagtgggaggactgcccagccgcacaccttccagctctgttcttcccgggccctggatgcttcttgccacgctgtcctctgaaatgacgctctgccccagcagacctgtggtaggtgagctagtgaggaagcacacctgggctcttcccaccaggcatcccagccctggtgtggggtatccgcatggttgcaggcatcccctggccaggcctgggtgctcattctccctctctcttcttgtctcctcccctctccctgctttctctgccctgtcctcctcctttttgctgttttcccccggactcctgccatgcccccagactttctttttcccacggatatgggctcattccaaggaaagggtggcatttggacacaaggccctagatcccacgatggaggactggggggtacctgatgcccctcagaaagaggcctgcagggacagcacatgggaaagccccatggctttgtgatccatctggggatgtgatccatttgggtaaggacttgggtttcagggcatgagttggcttccttgcaggatgcaggtccttaggtgggtggcctctgtctccagctgtagggccctgccaggaagcctctatatgagcctacctccctcctgcaggaccagagaggggttgttatgaacagcccaggggattggttgcactaagcttgtcttgaagctttggctggggagtccaggtgcccatgtctctcacctgctccccatacacatctctgcacacctggctgaggcattcccagacctaacctcagataatgtgcatgtgatgaacactcccaagtggctaggcctcttgcacctgagcaggtggattctgccccagcactggggctttctctgggctgtccatcatgggtatatctctggattccaggattgctagttagcacctcacatttgagggtctgtgctattcagtctagaatcagagttggatgagaaatcaactttgaacaccacctttggggtggctgcattggctcacacctgtaatctcagcactttaggaggctgaggcaggaggatagcttgaggccaggagttcgagactaaccggagcaacatagtaaggccacatctgtacaaaaaaaagaaagaaaaaattacccaggtttggtggcatgcacttgtagtcccagttgtgggctgaggattatgcaggtgacaaggcaagagactgaaggcacaaactgtttcagtataataaagaaaatagaataataatagtcataattatatatagagatgatcatgaacaattatcaatcattataataaacattattaatcattagcttttattattactctttgttgtgttactaatataacctaggaataaacggtgtgctgaagggacattgtgagaagtgacctagaaggcaagaggtgagccttctgtcacactcacataagggctgcttgagggctccttggtcaagtggtaacgttagtgtctgggacagcaccgttacttagcagaccacaaaagggagtctcctttccttgggggagtgagggaacactctgctccaccagcttcttgtggaaggctggatattatctaggcctgcccgcagtcatctggaggccgaaacccctccctgtggtgctgtgcttcaatggtcacgctccttgtccactttcatgctcctctcacactcctggttcctctttgaagtttgtagtagatagtggtagaagaaatagtgaaagtcttaaagtctttgatcttataagtgcagagaagaaattgctgatgtatgctgccttctctctctgcttcagctacctaaaagagaagggcccctgtcctgtaatcacatgacttgcttcaccttgtcaatcacttagaagattcaccctccttaccctgcccccttgtcttgcatgcaataaatatcagtgagcccagctgttcggggccactactggtctctgcatcttgatggtggtgttcccccaggcccagctgttttctctttatctcttcgtcttgtgtctttattgattacaatctcttgtctctgcacatagggagaacaccccctaagccccgtagggttggaccctacatctagttactcaggaggctgaggcaggaaggttgaagttgagcccaggaggttgaggctgcagtgagccatgattgtggcactgcactgaagcctgggtgatagagtgagaccttgtctcaaacagcaacaaacaaataccatctttgggtatattaatcagatggggggagtcacactgacatcagttggcacccactggttagtgtgtgccaggcagggagactgggctgttttcagtaaactgatcacagcagtgagctgtgatcgtgccactgtactccagcctgggtgacagagtgagaccttatttccaaaaaaaagagaaggcattggagttcagcttgtggttttgacagagaaataataggataaattaatgaaacaaaaaagttaacagtagaggattaataaaactaagttttttttttctaatttcttttcctttcctttcctttcctttcctctttccctttccttccttcccttcccctccctccctccctcgctccctcccttcttcccttcctacctccctccctccctccctccctcttcccctcctcccctcccctttgtatgtaagtgtagatgagggtgtctgtgccttgtgtttgtatatgtgagtatccacatgagcatgcctatgtgtatgagtgtgtatgtgagtgtggtgagttgcttctgtccacacatttgtgtatatgagtgtgcatgcaagtgtgctgagtgtgaaagtgtgcctgtagacatgtttgcctgtgtgtgcgtgtgtcaaacacagctgtttctgtgtgtgagtgtgccttatctgtgtgtgtgcacgtgtgtgtgcacgtgtgcacgtgaatgtgttgagtgttcctgtgtgaacacaggtgtgttcctatgtgtgttatgtgagcatgtgcatatgtgtattctcgagggctgagggacccagccctaccttcagcacctgctaactgtccccacacccacagcgggcccagcacagggatcacattgtcggggtgacctggatcctacttgaagcctttgagctggactgtggctttatccctgaggccaggcttcatgtccagatggccatgccagaggttgacgtggcagagaaggagtgtgacacaggccagtggagcgagtggagccagcctgtgtgcttccaggctccccagagacaaggtgggtgcttctgtggctgctgcacttccagaatctgggctgggtgtcttctcccatgatgacctcactcctccaacctttcacactcctggaagcccctccctgaggcagccatgccccagttgacttgcttcctctgaaggtctgaggtctatagggaggacacaagctcctgccctaacacatctctgcacacctggtggtcttaggttagggttagggtcagggtcagggtcagggtcagggtcagggttagggtttagggtcagggtcagggtcagggtcagggttagggtagggttagggttagggttagggttagggtagggttagggttagggttagggttagggtattgtaaataatttcacattactaataataaattattatttgtattacactattacgtaatgtaaaggctattaagacatgtttgtcttcaaagaatggccttggtttctgtgggcagtgtcctcatggaaaggtaatgcgttcctgctaaatcatggacaaaacgggcttccaggagctacaggctgcagcagcagcttctcctctacgtccttcactgcctcatactgttgttgactttgaaagcttttttcagtctagttttatcaacagagctagtattttcatgaggttctactacataccaggttccagaaagctaaatgccttttgtttgttattattcactaaatagaaatcacaactctctcctcattactcacacaacaaaatttagctgagggagactgagtgactgtcccagggtcacacagctactaagagcagagtcatgtttagattcatgtgggaatactgaacacagacatgaaccagtggaaacatcctacgttccaaaagcctactcaagccatttgttcttattttaaggaaaatctttatgctaattttaaactccaaatacttatgaatggcagagatctacagatttgattctgatgtaagaaatgatggtcaccagctggttactgctaccaccccacaaccccgagcatactggacgaatgtctaagccttgtggttagtggggacaatgctggtggagtctgaagttgtcatgcagtgactcatgcaagcttaggcagatttggtgatatatgacacagagatgcaaagaaatgttgtagctgacacacaccggctggctctgggagatgcagaaggagcacgtcacccaaaatagagccagacagacatccttaaggaaagagccaaggggctgcatcttaaagaatgaagaaaggatttgtcatgagagatgggacaggaagttcttgagaggcagagggagattgtgagaatgttgggaagggaggagagattctcgcacatctgggaagctgacaatccatcagcatgtccagaaggaaaataaggaggaggagcagaaatagatgaggctggatatagaagcagggctgaagctgtgtcgattgtggtaaagagttgtgattctatccagaaggcaataggtagcattctaaacagagatcttttaaaacaagagtcagcaaatattttctgcaaggggctaaatgttaaatatttcaagttttccaagccatatggtctctctctcaatgactcagctcttccattataccatgaaagtagccagagacattatgtaacacatgtattggctgtgccccattacaactttacttacaaacgcagactgtgtcagacatggtccatgcatggtagtttgccacactctgttttagaaagctcaggtttatgatgtgatggagaatgcctacaagagctcttgttttaaatggtagagtgaacatacactggaattctatcctgcttgacccaagctcttgatagcaaaaggtagaaaagatagatggtaaacagatagatagatgatagataaagaaaatacatagctgttccagaaaacagaaatggataacttcatgaaccaaaagcagagtaatatactttagaaggaagcaggccagaaaacccacagttgcaaagcaaatagaatttccagctgcctcttgtagccccttcctggaagtagtcacagcccagggtgtttgacttcttcctctgttttttgtttgtttgttgtttgcttttctctggggtttttgttgttgttgtttgctttttttaaaaaaaattccctttccctgcttttttgtcacagtagcctttgtcacttcaaacactgcaagtgttctttaaaaaaaattatatcaacctttcaattaaaatgcaacatgtctgaaacttggtatctggagaggtgagttggacaaaggagcccttgttactgcacgttttcattcttcaaatttcaccttgcacgcagtaacagacagtgcacaaagccacttccttatggacggaaattctgaaatccttttatgcctggcctttccatccttcatcttcccctctctcacactgtgaaggatcgtattggacatttttgttttaatgtcagtgacaggggaacacaggtagctctaatatagctgtgacccagatgcttctgtttctagcacgtatttattttgcagcaaacatttacatccatgatgttttactgtcttttgaaaataattaggcaatatctcatctgaggtaggatgtttctaggggttgtgttctgagggaggaaaactaatctgttctctttccactgcattctaggaacagtaagaggaccttgtgcatgaataatttgtttccacactacagagtgggtaataagcagattagtaaaaacaattctgcttcacttcaataacagcctcctccaactcattttttctcaacaaacttatttttccagcagaagaatcccagacttcttagagaacccagtgactttttgcaccttaaatctgtgaaatcctcatgttttcttctgccgtatccatagttcaaacaaagatgaggcaaagctagatgcattcctgaaggaacccaagaaattcctctctttatttctctggaatgaaatgaattctctagaccaccagttctaaccttcaaaaaccaaacctgtttgtgagatctccttcaaatactactgtagaccccagtgtttattcattaaatttttaaaatatttgttttatttggaatccatgtatttgtaattttagtgtttgtattaatacaagggagaaatgtttaaatctgtctatgccatatgtgcctctggcttattgcccaattaattgtagcctcaggctaaactttggtttctgtctttaatttttgtcagaagaaatataactgatctcaaaacatctgcttttattgtaggggctcgtgctgccatctccattcctctctcttttcttgcaatctgggtggaagttctttaatatgaacatttcaaccaccttcattctaccatgtccactatcagcacattcaaacttatccagccaaggctgtcatcttaggccagggattttttaggaatctattatgctgtgatgcggctggcacccctttgactcactgtatcaccccagggttcttttcatttcagaagcccaagagggcagaaaaagaaataggtgagcaattaaaccctctgagtcaggagcgtctccccttgcgttaagcaatgttgtagaacatcgtgtttagcaagctcctagcagatgagccacgtggctgctgagcacacacgcctgcttgctgctgtgagctcaggcaccatcatcatgtcttttccatctctggagggaattgtaagggccacttaataacctgtaaatcacagagagttaaaggtgcttccccaaaacactgatgacagaatgaaaggtgaggagtgttagccacaggtcacaaaagtgcaggaaagtctctcagtgtgggttgttgaagaaatgcaggtcttttttcttttggaagtctccctagaatggggtcaaggactctgcccattctaggatgaaaaattgggatattagacaccttcagatatttatccccagctttcattttgggctcttaattagtttgttcatccatcacaatctcaaatgctaagcagggcatttgaatctctccacagtgcaaatcagcgccgtcttttaaagttgagtttcttattattctcacctgatataccttatttatcccacacccaccccaataacatatcgtgctcactgttatctttgaggcaacccttgaattttactcagcctggagcgctcttcacgtcttgtccagagccagttcggactcattcttcagccgtgcatcagtcagtgggggctagcttaaactgtggtgacaaacaacctccaaatttcagtggctcaaaaatcttcttccttatttatttacatctcatgactggtcaggtgagaggtagctctgtgctgtgtcatcctaacacaggaatccagaaggaaggagggaccgtcaatgagatccccattgctatagaaaagagaaaaaagcatgcggaatagaacgctgtttcttggagatttctcctgaaaaagtcacatgttatttcttctcacctccatcggcaaaaaaaaaaaaaaaaaaaaaaaagtcatgtggccatgggaaaatttaagtaggtgggatggaacagtcagaatgcattcataaaaaataaactgaaaatatttggagaacagcaccaatgactatcatgaatgccaacttacatccctaacaacccagtgctgttaccctccaaactttttatgtcttgcaaagtattagaacttcatatctgaagccataccactcagagggaatgcaagatacatattgacatctcctttaggatgtccatagagaattcaagaaaagaaataatttaaaagtgcttttgggtacagctatttagcactagagggtaagagtagagatagattgtaaagataataatagggttaggcataggattaggatctgggtcagagtcagggctggaagtatggttagaggtggggtcatggtcagggtcaagatcaaagtcagggttaaagtaagggtcagaattagggaccagggtagggatcaggatttagcttcaggctcaaagtcttgggacagggttagggttagaattagaaccagagctttgttctcaggacccacccgaggatgggtcaccatggctttggagcacctggtagtgtggcatgtccacagtgaagaccagagtttcgttgtccttaagactgacctgggagacgtggctggaggccattgaggaaggtgaggcaaaagcttcctgtctgctccccgtgtgctgaggagggagctctgccatgggctttactttcacacgttatattctacaagtcttgttttacaaaagcatcccttccttgaggcttcggctgctcatcgctgctcatcatcatagcgtgccataacatatagtaagatttgggtttgtttctgggagagatcttggcatagagaaaggagaaatgcttagagccaccatcaagacagttgggatgaaagctggggataggcagaggctggaggaaacatgtgcaccccttgtaaacacttattcatgttttagttattcacttaaagtgttaaattagtaaaaatagtattgaaaaattgaaaagtaggcatattaaaacttgtaacactatttaagcttagatatattatttgtacctcatcaacattttttattttgttgagaaagtgtaaggttaattggcagcatatttctaatagtagatagaataatgtctgttttataaacattgacatcctacattacatgtgtgaaccctgaaaatctgagacagctctcagattttttagaaagtttattttgccaatcttgaggatgtgcgcccgtgatgcctccccaggaggtcctgacaacatgggcccaaggtgatcggggcacagcttggttttatacactttagggagacatgagacatcaatcaatacgtgtaagatgtacattggttcagtccagaaaggtgagaaggccagacagggggcttccaggtcataggtaggtaagagacaaatggtttcattcttttgcattgctgattaccctctccaaatgaggcaatcaggtatgcatttatctcggtgagcagatgggtgactttggatacaatgggaggcgggtttgccctaagcagttcccagcttggcttttccctttagcttagtgattttgattcccaagatttattttcccttcataaggttttcctatgagcattaattattcattgtgtattttatcacacaaataaggcacagatttttaaaaaatcatcaacttcctggctacctatatagacataattacatagaagctcaactaaatttgcaaacattccagagtttgggtttccaataattctttgtgattctttaaaaggtaaagtatttttttcccataaaacatagcaacatttaaaatcacccgtagaatgtcctgccatttttgtttctgtagtttcctcattttctgcaaagcctcgctgaggaaattgactttgaatatccttttacactcttctgttttagaaagcattgtggtaaaacattgaatcatcatggtcataagttctgttcacattctttcttgctttgaatattttttcccagtggccaatatttgattctgttgtatcatggctaaaaggtaggcatggcaacaaaataaagacaggaagtctttggaataagtgatcccatcacaatgaatcaatttgccattggaacatatttttacaaagtcactcttttgaaaatatttagctatgaattaaaacagagtctgtatggttaatatttttcctggtctaaggtgaacagcattttagagaatgaactcaggacacaaccacagcacaagaaaaatgtgataattaagtttacacatatgtgttactactgcaacagaaaacatgtaaagaacatttgatttatgtatcagtctgcactgtttaattttttgtgtcataaatactcttatttaaaaaaacaggactagttaacagtgtcaattactagtaattcatggtataaataattaaacaaggaagtgttcaaaaaaaacagtgttttaaataaagttttattttacatcatcttttttacttacacagaaattgtcaaaaaaaagcagagatttcccatgtagccgcaacctagtttcctctcttattaacatcttctatcagtgtgtctcacatggcttattaatatcttacataatttgtcacagttaatgaaccaatactgatagactattattaattgaagttcatatttcatttggattcccttagttctatcttactctgacccaggatcccatccaggatcccgcatgacatgtagacatcacgtgggctcttcctggctgtgacagtgtgtcaggctttccatctcatgatgaccttcatagcactgaggaggattggtcaggaatgttgtagaatgtcccccattgtcacttcatgttctcaaggtgaactgtcacctttgatgttcacttggatcatttggcagagctaatgtttgtcaggtttctccactgtgaggttatttctcctccttgtccgtactgcatgtgttcttttggagcaagtcactatgcagagcctcactctgtcaggagttggctccaccttcttgacggctgagtgtctacatcaattatttggaattcttttgcaaaggagatttctatgcaactccatttgcttattcacctaggtatacaaatacagacacctagataattactttaagctttagttattattcaacactacagtattatgttgcacaattcattcctgtgttggccatcagtagctgtttttattggctcttatttttctttgatatgttttaatttttttagtacttactttctgatacttccagattatcctggctcctatatttactgtcccagttctagtatcagacatttcttcaaagagcctgattactttcagaatggtaggaaaacttacatctggctgctgaatgagcacattgtatcttctccctcattggcaatgctaggaagtatatgtgtgtgtctaacctacctatacacacctaattataaagttttctatgtagaactgtgtgtgtctatattaaactaaacataagtttacgttgatgtctccacctctgatctactatcacatgaatcattctagccttctcgccttgctaatttgtaacctcccacttcaacagtaagaaacctggttcccaccatctgtgacttatgtaagtcattgttttattccagatacagacactgtggttttacaattgttcacaattgcttctgttggaaagaactttataaaatggaatccaataatgaagtatagttcatgtgccttcagcctacagattctattcattttcaaagtttttacctagatttgtgtcttagtccattttgtgcttctgtaacagaatacctgaggctgcgtaatttataagtaaaacagtttcatttgtttgacaatactggtggctggaatgtgtgagattgggcagttgcatctggtggggcctcagtctttttcacctcatggtggaaagtggaaggggagcaaggggtgcaccagagatcacacagcagaagtgaaagcaagagggaagccaaggaagccaggctctttttaattacctgctcctgcaggaattatctattcctgtgagaacagaactcactcacccccatggaggacattaatctattcatgagggatccgtccccaggacccaaacaccgtccactaggccccaccgccccacactgacacagtgggagtcaaatttcaacatgagtttttgtggggacaaaccacatccaaaccatagtaatttgtagcataaattctttttcacatgatgtattctgtcctgggatactccacatcctgagtaatttgatttaatttgaatagagtttgctttaaccatttggctgtaaaattctgcatatttcgacaaatgcattgtggcagatatcccactattaaagtatcatatggaatgcctcaaacccccaccccatggagccaatggcttcccatctgtgtagtttgccttctccagtgtctcattaaatgaggtcacactgtgtgtatcctcctcagactgtcttcttccacttagcaatgtgcatgcaagattcactcatgtctttgtgtgtgttgatatcttgttcctttctatggctaaatagtattccattacatgaatgtagcagaatttggttatgcattttggggagcagaaccttcctcttctaactttgttccagggttggagaccttcaagttaactgacaatagatacattagtaggagagacaatacttggcttcttgttccccaagcatcattgtgggacaaaattcatcagatggcaggatccagtttacaaagaggtaaaaatagcccagaaacaagaaacaagactagaatctgataactcacaatggctatagttttcctttaaaaaatttttttttgagacagggtctggctctgccgcccaggctggagtgcaaaggtgcaatctcagctcactgcaacctctacctcctgggtgcaaacgatcctccctcctcagcctcctgattacctgggactacaggcacatgccgtcatgcccatctaatttttgtatttttggtagagacggggtttcaccatgttgcccaggctgatgttgaactcctggccttccaaagggctgtaattataggcatgtgccaccatgcccggctgtgttatacttttcctttgaaagataaaatttctctctgtagtaaccatcatttttgatcataatcaaagtaagactattcttgttttaaaaataagtctagttttgttagattttgcttgattatttacgtaagtgcagcaagaacaggagatgaccacgtaggtgctttcaggtttctttgctggaagttttcatacagaatctcagatttgacttttaaaggccttattcaggctaaaagccaagccaagaacatactatcaaatttcagctgcagtccttatagctttgtgtgaattcctctcttcttgaggccccaaaatatccctaaattcctgggcctaccaggaaatgaccttccttactaacctataaggctgtgaaccctgtaatctaggtatcaggctgggttttctcagagtgctgttgggaatgaagttttttatgttcccccccccaaaaaaaagaactaacatgggaacaaatgatctcttagcaaggcgagctttatttttctgcacaaagggtgctactcaatagctgtccagctacaagagcacaccaaacaaaggagacagagttacttataacctgacgtgtctaccctactgctgtgtccagtttccattggctggaataggacctcccattttacactttacccgattggctgttagtttaaaactttcttaattaggtaaggggaatagaagaaagaaagaaaaggaagttgcccagggatagttaaggaagcacctccaaataaggaatggcatgcactatgggctggggcttgtctagttctgtccaggcatgctggagcaagctaggacaagtgatttggaacacacacacacacacacacacacacacacacacacacatataaaaatagtgggtagttgtgactttataatctttgaggaagaactttcctcaaagttttccacagtgctttgtaagcattgtctccataaaagtcaaccttacttccttaaaattgctggtcataactgatcttaggtacactccctaaatatgatattccagtaaaaaccttgataatataaccaaaatttccaattatgtcctgttataagatgaatagattcttattggacttttgctaacaacaatatcatcgtggaaataagagtattcagtaaggatttcaaaattctggaaaaatcaggcaagaaaaaaagataaacgcttcatttctgtttacaaaagtataatctactaaattgttgtaagttacagttagagtaagagaaagagatttcttaaatccagaaactagaatattaaccagcaatgctccaaaaagctatacaattataatcaattttcatcagttcattcagtgccatgtaatcaattccagtcttgtggatcttgagttagcagtgtcatgaacccatcagtttcccaaccggacttctggagaccttaactgagtcaagtgtatggtcttaaagttatttaagcaatatcatcagaagcctataaccagagtacctgtcatagtcttttctgtgagtctcagggggagtcctgtcttggagacgaacattctgacctgtagttgattgcaggagctttcaggaaagcatcagggggaaataatatctaaatgacaaaaagtatgaaatggctgtgatgaaagatctgatgagagttcattataccacagctgacaaggatattcgattttttctgtggcagacaacatttatttatttatttatttagagacagagtcttgctctgtcgcctaggctggagtgcagcggtgcgatctcggctcactgcaagctctgtctcctgggttcacgccattctcctgcctcagcctcccgagtagctgggactacaggtgcctgccatcacgcccggctaattttttatatttttaatagagatggagattcaccgggttagccaggatggtctggatctcctgaccttgtgatccacccgcctcagcctcctaaagtgctgggattataggcatgagccactgtgcctggcacaacatttaaagtaataattggaattatgactcattactctatagtggcacatagcatggataaggaggacattgacaaacttccaggaattttatataatttctgaaaacataacattttacccatacaaatataacacagggaaggttaggtatctctttttatttgtatcttctgtatggttttccttataaaaaatgcaacctactttacttgcgaaacatgccctacttttcttgcatgctttgcatagagttgtttctagttattctattatttctagtagttttatttacatatattgattataattttaatacttagtaatcttttattttccagagaaaactaggaagtagacagttataaactgtcatatattagcattctatagtaggttagaaaatgtatgaatataccatctcccaacatctagagggatgtgtttcctcataatacaattcctcagtgtggcagaaaaaaacatgtttattaacgggccaaaatatctttagtctctctgtaaaaataggaagccaaaagtatataaacttgaattatttatgttcagtaattaatgttttagtattgtatcttatttataaatggtctagatatttaatgcaaatcttttacttagcttaactttaaggttaaaaattaccaaaagtactttggaaactattcttaggcagatttactgtaaacaaattatttttgaaataatgtttttcgcttttcacaagacggcaccgaaagcgaaggaagctcctgctcctcctaaagccgaagccaaagcgaaggctttaaaggccaagaaggcagtgttgaaaggtgtccgcagccacacgcaaaaaagaagatccgcatgtcactcaccttcaggcggcccaagacactgcgactccggaggcagcccagatatcctcggaagagcacccccaggagaaacaagcttggccactatgctatcatcaagtttccgctgaccactgagtcggccgtgaagaagatagaagaaaacaacacgcttgtgttcactgtggatgttaaagccaacaagcaccagatcagacaggctgtgaagaagctctatgacagtgatgtggccaaggtcaccaccctgatttgtcctgataaagagaagaaggcatatgttcgacttgctcctgattatgatgctttcgatgttgtaacaaaattgggatcacctaaactgagtccagctggctaactctaaatatatgtgtatcttttcagcataaaaaaataatgtttttcataagaatgacaacttaattagaatcaaatctataagctttaagattttacgtttctagtaagtataatattagcttatttgactagaactcaagcagaataggaatttatgcttgttttatattcaataatgataattttgaagatatagttgttttattacaccaaaaatactatattaatcttatttaactaagttttatccaaatcatgttaacttaagaaacatttgatcagttcctatatttctaggagtttggtgaatatttatttataaatgcttatttttttccaagccaagttagaatagagcacttttagaggatttcataaatgaattttgtaatgctctctggagttaagaaaatatcacatatacataacatacattaatagatacacaaacacaaatagagatttcatagctttcatcctgaaatttcagccatgaatcaggcataaatattctgatggttaatttcagacatctacttgatcggattgagagacacacatagctggtcaaacacgatttcagccatgaatcaggcataaatattctgatggttaattttagacatctacttgagtggattaagagacacacatagctggtcaaacatgatttcagccatgaatcagccataaatattctgatggttaattttagacatctacttgagtggattaagagacacacatagctggtcaaacacaatttcagccatgaatcaggcataaatattctgacggttaattttagacatctacttgatcggattgagagacacacatagctggtcaaacacgatttcagccatgaatcaggcataaatattctgacggttaattttagacatctacttgagtggattgagagacacacatagctggtcaaacacaatttcagccatgaatcaggcataaatattctgacggttaattttagacatctacttgagtggattgagagacacacatagctggtcaaacacgatttcagccatgaatcaggcataaatattctgacggttaattttagacatctacttgactggattaagagacacacatagctggtgaaacacgatttcagccatgaatcaggcataaatattctgacggttaactttagacatctacttgactggattaagagacacacatagctggtcaaacacgatttcagccatgaatcaggcataaatattctgacggttaactttagacatctacttgattggattgagagacacacatagctggtcaaacacaatttcagccatgaatcaggcataaatattctgacggttaattttagacatctacttgactggattaagggacacacacagctggtcaaacaatttcagccatgaatcaggcataaatattctgacagttaattttagacatctacttgagtggattaagagacacacatagctggtcaaacacgatttctgggcatatctatgagggtgtttctggaagacactgagataaccatgacccaatgtggatgggcactgatatggtttggctgtgtccccacccagatctcatcttgaattgtagttcctgtaatacctacatgtcgtgggagggacccagtgggaggtgactgaatcatggtggtggttaccgccatgctgttctcatgacagtgagtgagttctcatgatctgatggttttataaggggcttttcccctttgggtcagcacttcttgttgctgccatgtgaagagggatagctttgcttccccttctgccatgattgtgaggcccctgcagccatgtggaactgtcagcccattaaacccctttgttctttataaattgctcagactcaggtatttcttcatagctgtataaaaatggatgaatacaggcaccatccaattggttgagagcccagatagaataacaaggaagaggaaaggtgaattatctccttctgaaatggaaacatccttcttctcctgcccttgacatcagaacttcagggtctcagacctttggcctcacaatcagagttacaccattggcttccccgattctgagtcctttgtatctggagtgagccatgctaccagctttcctggttctccaacttggagacaggctattgtggaacttctcagcctccataattatgtgaaccagttcccctaatgaatcttctctcatctatctacatatatcctattgattctgcctttatggagacccctgcctaatgtgattacaataactacaaaattcactagtttatatagaagacttggtttttgtctttgccccattttatatttgtattataactatgtatctggaaaatggaacaagttttttcttctttatatgagggctaaggcttttttctcaccaatatttttggagattttaaagattttctttttttttttgacatagaatcttatggaggctgagaaataattttttttctattttattcttcagccccaggtgtttgcttttgcagattcttgagcacattgagagcctccaaggcatggagtggggtgcctgaagtttcagtgattatagggagttgagagactcaactgggaaaggaaaggtctaaaaggaggcaatttggaaaataaaaattttctcaaaggagccattaaagttgtaaataattcttagtaaagtcatgcaaacaggaaaagaagtagaattagttccatattggtggaacacatagtcagcagaggttggagaagggagaatttagtgaactgagaagttcccatgaaagcagcaagatcaagatcacagagacaccttgaaacaaaaagccaggaataacttccaacccaagaggagaacagagaggcctcaaaaccaaagctaggataagaaacttgtagcccaagagttatcttccagacaaagaagcctgagattccaacgcagcttcagagagtgctcactcaaaatgttactgaaactgtaggctttttaatgacttagccatgcctgcaaaaggcattccctaaggtggcacagaagatggagcccccatatccaaagatagccaaggagaaagaaagacccctgttgccagagccagtgggcaaaggcaacagaaaaggagacaagggtcctaatgggatgagatcctttcggatttaggcttttatacaaactcctgagaactggcaggttgacagccataaatggggtaccaaactttctactcattggattacaagttctcaggcatccagaatgattaacaaaatgacaatttctagggcttctgtgggagagtatggaaaggtctttttgaaccttttaatgctgtcaatggaagaatgatgaggttcataaatttggaaaggagacatttcttcatttttatgcttatttttatttttttttgagacagagtttcactcttgttgcccaggctggagtgcaatggcgtgatcttggctcactgcaacctccgcctcctgggttcaagcgattctcctgcctcagcctcctgattagctgggattacagatgcccaccaccacacctggctaattttttgcagttttggtagagacagggtttcatcatgttggccaggctggtctgaaactcctgacctcaggtgatccacccacctcggcctcccaaagtgctgggattacaggcatgagccacccacccagtgagagatttattttctataaagggttgtagcctgcagggttgtccttctgacaggctgggaagcatagcctccagccagaagccagaaacagatgcttcaaggaggaggtaaaggaaatagcaacttatgctgagtggaatggccaaatagatttatttaataagctctaggaggagtcatgaatatttatggaaggagaaatgcatgcacgcacaattgagtttcttgcttcttcatgggtcccatgtacaaaaaatggcagtgttagcatgatcccagggtggagttttcagccctctgacattaaaaggtgaagcagaggacatgaaaacttgctctgtgcatcctctgtacgctggccagaacctctccatcgtgggtggtctcttatcaggcaagaaaggagaggttgatatcagtagtggaggctttgaaagggctggtttctgttaaatccttagggaagaaagcctcatcatggttagcaaaggagggggtataacgatgtgtatcttaaccccatcatcccatcctagcaaagctgagaactcagttttgaaagttactctggggtcccctcagccaagagtgggtctgttcagtcagttgggagcttagaatttaattttcatttatcaatgctaatgggaaagagtacgctgtcttcatggcagctgaatttgcaagaaactccttggatggggttaatggcagctgtatttttctgggagctgtgctttaattggataaagtaagttctggtaagatttcttcatcttcagtatctcaaatgttttcatttaaataatctttataacaacttttgatgtctgagtggattcccacacagtcatctattgtaagactttctgattccttttttttcctttggtcattatgaatagggcttctgtaaataactgcatggtagcttttgatgggaaataacatcaaagtagttgtcaaaatacctaggaatgttatttttggattgtaaggtgagacttgtttagctttggaaaaaaatgcccaacttgtaataggggaggaaaaataattttctgtttttggaattcttagatggaacgctctgtaaaaactgacagattaaaatgagaaaaagagaaaagtttaaaaacatgtatatcttatggttacatgggatatactcagggaaaaatgagtaaatctccaacaggtggctttcaattcaagcataaatactatcttcaacttaaagaaagaagatttgaggtgcagtagtgggaagttaaccagcaaaagcacattagacaggggtaaggtttgttatacagagttaagtccatgcagtctccattgataagactcttcagtgatttagttatccttctcttcttggtgtcgagagaggtagcttttaaatggtgatttcctttatagatgtaaattttccttacacaagtaacttctactctgttttcacaacttcctttgttagcatttttttttcaaaataattagcttggaataatttttaagccaaagggacatattttggggttgcatattctggtttcctaccattatattttggggtggcatagtttggtcttatacactgtgttctactggcaatgaaaagagttcttgtttttcctccagcaatttgtcatttgttaaagagcttagcagttctaagagatatagaccagctgtgctatctttttgtggttttcagttctctagtatgttgagcatctttttgtaagtgtacttgccatctgtagatcttctttggtgaggtgtctgttcagatctgtgtgcatttttaattgggctgtttaacttattgtttagttttaacaattttttatatattttgaatacaaattctcagatctgtattttgcaaatattttcttcaatatgtggcttgtctttttgttctcttaacaaggtctcttccagagtataaactgtaaatattaagaaatccacattgtcatttcttctgtgtatatcaaccttctgtgtcatttgttaaaattcattaccaaacgcaaaggtacatagcttttcctctatagtttcttctagaaattgtatagttttgcatttttagtgtaaggatgattttgagtgattatttgtgtaagttgtaaagttttcgtctacatgcatatcatttcttatggtttccaattaatcattccctcactatttttgggaaagacacaggatagtgggctctgttagagtagatagctagctagacatgaacaggagggggagctcctggaaaagggaaagtctgtgaaggctcacgtggagggaccaccaaaaatgcatatattagtagcatctctagtgctggagtggatgggcacttgtcatttgtggttaggagggagaagaggtacctacgcagaaacaccctagaacttctcttgagatgccccaatcatcattcactctgcaataaaaatgtcagaatattgctagctacatgctgataagaaggagaaaggggacattcttaagagaaacctggcaccataagtacagattagggcagagaaagacattcaaaagaggcagctgcagtagatacaaacgtgaccgctgtcagcctgcctggtatggcgggaaggaggctggtgccagagtggattcggattgatcaccacacatgtacctcaatcaacagtgaggaggtcccacaaggctaagtggggcaagtcggggacctaaggcagtagcaggaaaaccaaagaaaacaggcggagacttgagacagaggcaggaatgtgaagaagtccaaaataaaaatccctgcacaggactcttaggctgttttcatgcactatgagcctactcctccctatttttgtacaataagctctttacactgtatttcttttcaatgaagttatcttccatctttgtactgcctcttggtgaaaagctgtcttccaagttaataactgggacatcagctctccgcagtaatagctccttttcagttttaatttgcagaactgatggggattaataactggcgctccgactttaagtggtgcaggaggcggccagtaggggacgccagccgttacaccgggagcaagagggccgtccgtagtccccatctgcctgcatgtggcgtgcagcgacgacaatggcagcaagagggcccggcagtgtgcccagctgccagcaggcgggtgtgctgccactataatgtgaggaagagggccctgcaatgtccctagctgccagcaggcggcgtgccaccactatactgcgagcaagagagccctgccgtgcccctgcgccagcacggggcgctggacaccactgtaagcaagagggccctgcagttgtcctagtcgccagtagggggcgcaatggcagagcaccgtgggcaagctggtcctgtagtgcccggctgcaagcagggggcgcccgaaacgggcttttcagattactcaggttcaactcgtctctgcgccgcgccgccggggacgtgtgtctctgcgcgtgcaccgcaccacctccgcgctccccgccgggcggcgcgcgactgtgcgactgcaacactcccagccaccctcagcccagcgacgtgcgtctctgcgcctgcgccgcgcctcactcccgcccgcccagcgacccctcccctccggggaggcgccggcgtgcgtctacgccctgcgccgcgtctccccaacagcggcgcgcctctctgcgcctgcgccggcgcgccgccccctctctgcgcctgcgccggcgcgccgccccctctctgcgcctgcgccggcgctccgccccctctctgcgcctgcgccggcgcgccgacccctctctgcgcctgcgccggcgcgccgccccctctctgcgcctgcgccggcgcgccgacccccccctctctgcgcctgcgccggcgcgccgaccccctctctgcgcctgcgccggcgcgccgacccccccccccctctctgcgcctgcgccggcgcgccgaccccctctctgcgcctgcgccggcgcgccgaccccctctctgcgcctccgccggcgcgccgcctttgcgagggcggagttgcgttctctttagcacacacccggagagcatcgcgacggcggagctgcgttctcctctgcacagacttcggggctattgcgaaggcggagcacagttcttctcaggtcagacccgggtgggcgggctgagggcagtgccagggcggagctgcgttctgttcagcacagacctggggggttagggttaggggtgccgttggggttggggttggggttagggttaggggttagggttagggttagggtttagggttagggtttagggttagggttagggttagggttagggttagggttagggttagggttagggttagggttagggttagggttagggttnnnnnnnnnnnnnnnnnnnnnnnnnnnnnnnnnnnnnnnnnnnnnnnnnnnnnnnnnnnnnnnnnnnnnnnnnnnnnnnnnnnnnnnnnnnnnnnnnnnnnnnnnnnnnnnnnnnnnnnnnnnnnnnnnnnnnnnnnnnnnnnnnnnnnnnnnnnnnnnnnnnnnnnnnnnnnnnnnnnnnnnnnnnnnnnnnnnnnnnnnnnnnnnnnnnnnnnnnnnnnnnnnnnnnnnnnnnnnnnnnnnnnnnnnnnnnnnnnnnnnnnnnnnnnnnnnnnnnnnnnnnnnnnnnnnnnnnnnnnnnnnnnnnnnnnnnnnnnnnnnnnnnnnnnnnnnnnnnnnnnnnnnnnnnnnnnnnnnnnnnnnnnnnnnnnnnnnnnnnnnnnnnnnnnnnnnnnnnnnnnnnnnnnnnnnnnnnnnnnnnnnnnnnnnnnnnnnnnnnnnnnnnnnnnnnnnnnnnnnnnnnnnnnnnnnnnnnnnnnnnnnnnnnnnnnnnnnnnnnnnnnnnnnnnnnnnnnnnnnnnnnnnnnnnnnnnnnnnnnnnnnnnnnnnnnnnnnnnnnnnnnnnnnnnnnnnnnnnnnnnnnnnnnnnnnnnnnnnnnnnnnnnnnnnnnnnnnnnnnnnnnnnnnnnnnnnnnnnnnnnnnnnnnnnnnnnnnnnnnnnnnnnnnnnnnnnnnnnnnnnnnnnnnnnnnnnnnnnnnnnnnnnnnnnnnnnnnnnnnnnnnnnnnnnnnnnnnnnnnnnnnnnnnnnnnnnnnnnnnnnnnnnnnnnnnnnnnnnnnnnnnnnnnnnnnnnnnnnnnnnnnnnnnnnnnnnnnnnnnnnnnnnnnnnnnnnnnnnnnnnnnnnnnnnnnnnnnnnnnnnnnnnnnnnnnnnnnnnnnnnnnnnnnnnnnnnnnnnnnnnnnnnnnnnnnnnnnnnnnnnnnnnnnnnnnnnnnnnnnnnnnnnnnnnnnnnnnnnnnnnnnnnnnnnnnnnnnnnnnnnnnnnnnnnnnnnnnnnnnnnnnnnnnnnnnnnnnnnnnnnnnnnnnnnnnnnnnnnnnnnnnnnnnnnnnnnnnnnnnnnnnnnnnnnnnnnnnnnnnnnnnnnnnnnnnnnnnnnnnnnnnnnnnnnnnnnnnnnnnnnnnnnnnnnnnnnnnnnnnnnnnnnnnnnnnnnnnnnnnnnnnnnnnnnnnnnnnnnnnnnnnnnnnnnnnnnnnnnnnnnnnnnnnnnnnnnnnnnnnnnnnnnnnnnnnnnnnnnnnnnnnnnnnnnnnnnnnnnnnnnnnnnnnnnnnnnnnnnnnnnnnnnnnnnnnnnnnnnnnnnnnnnnnnnnnnnnnnnnnnnnnnnnnnnnnnnnnnnnnnnnnnnnnnnnnnnnnnnnnnnnnnnnnnnnnnnnnnnnnnnnnnnnnnnnnnnnnnnnnnnnnnnnnnnnnnnnnnnnnnnnnnnnnnnnnnnnnnnnnnnnnnnnnnnnnnnnnnnnnnnnnnnnnnnnnnnnnnnnnnnnnnnnnnnnnnnnnnnnnnnnnnnnnnnnnnnnnnnnnnnnnnnnnnnnnnnnnnnnnnnnnnnnnnnnnnnnnnnnnnnnnnnnnnnnnnnnnnnnnnnnnnnnnnnnnnnnnnnnnnnnnnnnnnnnnnnnnnnnnnnnnnnnnnnnnnnnnnnnnnnnnnnnnnnnnnnnnnnnnnnnnnnnnnnnnnnnnnnnnnnnnnnnnnnnnnnnnnnnnnnnnnnnnnnnnnnnnnnnnnnnnnnnnnnnnnnnnnnnnnnnnnnnnnnnnnnnnnnnnnnnnnnnnnnnnnnnnnnnnnnnnnnnnnnnnnnnnnnnnnnnnnnnnnnnnnnnnnnnnnnnnnnnnnnnnnnnnnnnnnnnnnnnnnnnnnnnnnnnnnnnnnnnnnnnnnnnnnnnnnnnnnnnnnnnnnnnnnnnnnnnnnnnnnnnnnnnnnnnnnnnnnnnnnnnnnnnnnnnnnnnnnnnnnnnnnnnnnnnnnnnnnnnnnnnnnnnnnnnnnnnnnnnnnnnnnnnnnnnnnnnnnnnnnnnnnnnnnnnnnnnnnnnnnnnnnnnnnnnnnnnnnnnnnnnnnnnnnnnnnnnnnnnnnnnnnnnnnnnnnnnnnnnnnnnnnnnnnnnnnnnnnnnnnnnnnnnnnnnnnnnnnnnnnnnnnnnnnnnnnnnnnnnnnnnnnnnnnnnnnnnnnnnnnnnnnnnnnnnnnnnnnnnnnnnnnnnnnnnnnnnnnnnnnnnnnnnnnnnnnnnnnnnnnnnnnnnnnnnnnnnnnnnnnnnnnnnnnnnnnnnnnnnnnnnnnnnnnnnnnnnnnnnnnnnnnnnnnnnnnnnnnnnnnnnnnnnnnnnnnnnnnnnnnnnnnnnnnnnnnnnnnnnnnnnnnnnnnnnnnnnnnnnnnnnnnnnnnnnnnnnnnnnnnnnnnnnnnnnnnnnnnnnnnnnnnnnnnnnnnnnnnnnnnnnnnnnnnnnnnnnnnnnnnnnnnnnnnnnnnnnnnnnnnnnnnnnnnnnnnnnnnnnnnnnnnnnnnnnnnnnnnnnnnnnnnnnnnnnnnnnnnnnnnnnnnnnnnnnnnnnnnnnnnnnnnnnnnnnnnnnnnnnnnnnnnnnnnnnnnnnnnnnnnnnnnnnnnnnnnnnnnnnnnnnnnnnnnnnnnnnnnnnnnnnnnnnnnnnnnnnnnnnnnnnnnnnnnnnnnnnnnnnnnnnnnnnnnnnnnnnnnnnnnnnnnnnnnnnnnnnnnnnnnnnnnnnnnnnnnnnnnnnnnnnnnnnnnnnnnnnnnnnnnnnnnnnnnnnnnnnnnnnnnnnnnnnnnnnnnnnnnnnnnnnnnnnnnnnnnnnnnnnnnnnnnnnnnnnnnnnnnnnnnnnnnnnnnnnnnnnnnnnnnnnnnnnnnnnnnnnnnnnnnnnnnnnnnnnnnnnnnnnnnnnnnnnnnnnnnnnnnnnnnnnnnnnnnnnnnnnnnnnnnnnnnnnnnnnnnnnnnnnnnnnnnnnnnnnnnnnnnnnnnnnnnnnnnnnnnnnnnnnnnnnnnnnnnnnnnnnnnnnnnnnnnnnnnnnnnnnnnnnnnnnnnnnnnnnnnnnnnnnnnnnnnnnnnnnnnnnnnnnnnnnnnnnnnnnnnnnnnnnnnnnnnnnnnnnnnnnnnnnnnnnnnnnnnnnnnnnnnnnnnnnnnnnnnnnnnnnnnnnnnnnnnnnnnnnnnnnnnnnnnnnnnnnnnnnnnnnnnnnnnnnnnnnnnnnnnnnnnnnnnnnnnnnnnnnnnnnnnnnnnnnnnnnnnnnnnnnnnnnnnnnnnnnnnnnnnnnnnnnnnnnnnnnnnnnnnnnnnnnnnnnnnnnnnnnnnnnnnnnnnnnnnnnnnnnnnnnnnnnnnnnnnnnnnnnnnnnnnnnnnnnnnnnnnnnnnnnnnnnnnnnnnnnnnnnnnnnnnnnnnnnnnnnnnnnnnnnnnnnnnnnnnnnnnnnnnnnnnnnnnnnnnnnnnnnnnnnnnnnnnnnnnnnnnnnnnnnnnnnnnnnnnnnnnnnnnnnnnnnnnnnnnnnnnnnnnnnnnnnnnnnnnnnnnnnnnnnnnnnnnnnnnnnnnnnnnnnnnnnnnnnnnnnnnnnnnnnnnnnnnnnnnnnnnnnnnnnnnnnnnnnnnnnnnnnnnnnnnnnnnnnnnnnnnnnnnnnnnnnnnnnnnnnnnnnnnnnnnnnnnnnnnnnnnnnnnnnnnnnnnnnnnnnnnnnnnnnnnnnnnnnnnnnnnnnnnnnnnnnnnnnnnnnnnnnnnnnnnnnnnnnnnnnnnnnnnnnnnnnnnnnnnnnnnnnnnnnnnnnnnnnnnnnnnnnnnnnnnnnnnnnnnnnnnnnnnnnnnnnnnnnnnnnnnnnnnnnnnnnnnnnnnnnnnnnnnnnnnnnnnnnnnnnnnnnnnnnnnnnnnnnnnnnnnnnnnnnnnnnnnnnnnnnnnnnnnnnnnnnnnnnnnnnnnnnnnnnnnnnnnnnnnnnnnnnnnnnnnnnnnnnnnnnnnnnnnnnnnnnnnnnnnnnnnnnnnnnnnnnnnnnnnnnnnnnnnnnnnnnnnnnnnnnnnnnnnnnnnnnnnnnnnnnnnnnnnnnnnnnnnnnnnnnnnnnnnnnnnnnnnnnnnnnnnnnnnnnnnnnnnnnnnnnnnnnnnnnnnnnnnnnnnnnnnnnnnnnnnnnnnnnnnnnnnnnnnnnnnnnnnnnnnnnnnnnnnnnnnnnnnnnnnnnnnnnnnnnnnnnnnnnnnnnnnnnnnnnnnnnnnnnnnnnnnnnnnnnnnnnnnnnnnnnnnnnnnnnnnnnnnnnnnnnnnnnnnnnnnnnnnnnnnnnnnnnnnnnnnnnnnnnnnnnnnnnnnnnnnnnnnnnnnnnnnnnnnnnnnnnnnnnnnnnnnnnnnnnnnnnnnnnnnnnnnnnnnnnnnnnnnnnnnnnnnnnnnnnnnnnnnnnnnnnnnnnnnnnnnnnnnnnnnnnnnnnnnnnnnnnnnnnnnnnnnnnnnnnnnnnnnnnnnnnnnnnnnnnnnnnnnnnnnnnnnnnnnnnnnnnnnnnnnnnnnnnnnnnnnnnnnnnnnnnnnnnnnnnnnnnnnnnnnnnnnnnnnnnnnnnnnnnnnnnnnnnnnnnnnnnnnnnnnnnnnnnnnnnnnnnnnnnnnnnnnnnnnnnnnnnnnnnnnnnnnnnnnnnnnnnnnnnnnnnnnnnnnnnnnnnnnnnnnnnnnnnnnnnnnnnnnnnnnnnnnnnnnnnnnnnnnnnnnnnnnnnnnnnnnnnnnnnnnnnnnnnnnnnnnnnnnnnnnnnnnnnnnnnnnnnnnnnnnnnnnnnnnnnnnnnnnnnnnnnnnnnnnnnnnnnnnnnnnnnnnnnnnnnnnnnnnnnnnnnnnnnnnnnnnnnnnnnnnnnnnnnnnnnnnnnnnnnnnnnnnnnnnnnnnnnnnnnnnnnnnnnnnnnnnnnnnnnnnnnnnnnnnnnnnnnnnnnnnnnnnnnnnnnnnnnnnnnnnnnnnnnnnnnnnnnnnnnnnnnnnnnnnnnnnnnnnnnnnnnnnnnnnnnnnnnnnnnnnnnnnnnnnnnnnnnnnnnnnnnnnnnnnnnnnnnnnnnnnnnnnnnnnnnnnnnnnnnnnnnnnnnnnnnnnnnnnnnnnnnnnnnnnnnnnnnnnnnnnnnnnnnnnnnnnnnnnnnnnnnnnnnnnnnnnnnnnnnnnnnnnnnnnnnnnnnnnnnnnnnnnnnnnnnnnnnnnnnnnnnnnnnnnnnnnnnnnnnnnnnnnnnnnnnnnnnnnnnnnnnnnnnnnnnnnnnnnnnnnnnnnnnnnnnnnnnnnnnnnnnnnnnnnnnnnnnnnnnnnnnnnnnnnnnnnnnnnnnnnnnnnnnnnnnnnnnnnnnnnnnnnnnnnnnnnnnnnnnnnnnnnnnnnnnnnnnnnnnnnnnnnnnnnnnnnnnnnnnnnnnnnnnnnnnnnnnnnnnnnnnnnnnnnnnnnnnnnnnnnnnnnnnnnnnnnnnnnnnnnnnnnnnnnnnnnnnnnnnnnnnnnnnnnnnnnnnnnnnnnnnnnnnnnnnnnnnnnnnnnnnnnnnnnnnnnnnnnnnnnnnnnnnnnnnnnnnnnnnnnnnnnnnnnnnnnnnnnnnnnnnnnnnnnnnnnnnnnnnnnnnnnnnnnnnnnnnnnnnnnnnnnnnnnnnnnnnnnnnnnnnnnnnnnnnnnnnnnnnnnnnnnnnnnnnnnnnnnnnnnnnnnnnnnnnnnnnnnnnnnnnnnnnnnnnnnnnnnnnnnnnnnnnnnnnnnnnnnnnnnnnnnnnnnnnnnnnnnnnnnnnnnnnnnnnnnnnnnnnnnnnnnnnnnnnnnnnnnnnnnnnnnnnnnnnnnnnnnnnnnnnnnnnnnnnnnnnnnnnnnnnnnnnnnnnnnnnnnnnnnnnnnnnnnnnnnnnnnnnnnnnnnnnnnnnnnnnnnnnnnnnnnnnnnnnnnnnnnnnnnnnnnnnnnnnnnnnnnnnnnnnnnnnnnnnnnnnnnnnnnnnnnnnnnnnnnnnnnnnnnnnnnnnnnnnnnnnnnnnnnnnnnnnnnnnnnnnnnnnnnnnnnnnnnnnnnnnnnnnnnnnnnnnnnnnnnnnnnnnnnnnnnnnnnnnnnnnnnnnnnnnnnnnnnnnnnnnnnnnnnnnnnnnnnnnnnnnnnnnnnnnnnnnnnnnnnnnnnnnnnnnnnnnnnnnnnnnnnnnnnnnnnnnnnnnnnnnnnnnnnnnnnnnnnnnnnnnnnnnnnnnnnnnnnnnnnnnnnnnnnnnnnnnnnnnnnnnnnnnnnnnnnnnnnnnnnnnnnnnnnnnnnnnnnnnnnnnnnnnnnnnnnnnnnnnnnnnnnnnnnnnnnnnnnnnnnnnnnnnnnnnnnnnnnnnnnnnnnnnnnnnnnnnnnnnnnnnnnnnnnnnnnnnnnnnnnnnnnnnnnnnnnnnnnnnnnnnnnnnnnnnnnnnnnnnnnnnnnnnnnnnnnnnnnnnnnnnnnnnnnnnnnnnnnnnnnnnnnnnnnnnnnnnnnnnnnnnnnnnnnnnnnnnnnnnnnnnnnnnnnnnnnnnnnnnnnnnnnnnnnnnnnnnnnnnnnnnnnnnnnnnnnnnnnnnnnnnnnnnnnnnnnnnnnnnnnnnnnnnnnnnnnnnnnnnnnnnnnnnnnnnnnnnnnnnnnnnnnnnnnnnnnnnnnnnnnnnnnnnnnnnnnnnnnnnnnnnnnnnnnnnnnnnnnnnnnnnnnnnnnnnnnnnnnnnnnnnnnnnnnnnnnnnnnnnnnnnnnnnnnnnnnnnnnnnnnnnnnnnnnnnnnnnnnnnnnnnnnnnnnnnnnnnnnnnnnnnnnnnnnnnnnnnnnnnnnnnnnnnnnnnnnnnnnnnnnnnnnnnnnnnnnnnnnnnnnnnnnnnnnnnnnnnnnnnnnnnnnnnnnnnnnnnnnnnnnnnnnnnnnnnnnnnnnnnnnnnnnnnnnnnnnnnnnnnnnnnnnnnnnnnnnnnnnnnnnnnnnnnnnnnnnnnnnnnnnnnnnnnnnnnnnnnnnnnnnnnnnnnnnnnnnnnnnnnnnnnnnnnnnnnnnnnnnnnnnnnnnnnnnnnnnnnnnnnnnnnnnnnnnnnnnnnnnnnnnnnnnnnnnnnnnnnnnnnnnnnnnnnnnnnnnnnnnnnnnnnnnnnnnnnnnnnnnnnnnnnnnnnnnnnnnnnnnnnnnnnnnnnnnnnnnnnnnnnnnnnnnnnnnnnnnnnnnnnnnnnnnnnnnnnnnnnnnnnnnnnnnnnnnnnnnnnnnnnnnnnnnnnnnnnnnnnnnnnnnnnnnnnnnnnnnnnnnnnnnnnnnnnnnnnnnnnnnnnnnnnnnnnnnnnnnnnnnnnnnnnnnnnnnnnnnnnnnnnnnnnnnnnnnnnnnnnnnnnnnnnnnnnnnnnnnnnnnnnnnnnnnnnnnnnnnnnnnnnnnnnnnnnnnnnnnnnnnnnnnnnnnnnnnnnnnnnnnnnnnnnnnnnnnnnnnnnnnnnnnnnnnnnnnnnnnnnnnnnnnnnnnnnnnnnnnnnnnnnnnnnnnnnnnnnnnnnnnnnnnnnnnnnnnnnnnnnnnnnnnnnnnnnnnnnnnnnnnnnnnnnnnnnnnnnnnnnnnnnnnnnnnnnnnnnnnnnnnnnnnnnnnnnnnnnnnnnnnnnnnnnnnnnnnnnnnnnnnnnnnnnnnnnnnnnnnnnnnnnnnnnnnnnnnnnnnnnnnnnnnnnnnnnnnnnnnnnnnnnnnnnnnnnnnnnnnnnnnnnnnnnnnnnnnnnnnnnnnnnnnnnnnnnnnnnnnnnnnnnnnnnnnnnnnnnnnnnnnnnnnnnnnnnnnnnnnnnnnnnnnnnnnnnnnnnnnnnnnnnnnnnnnnnnnnnnnnnnnnnnnnnnnnnnnnnnnnnnnnnnnnnnnnnnnnnnnnnnnnnnnnnnnnnnnnnnnnnnnnnnnnnnnnnnnnnnnnnnnnnnnnnnnnnnnnnnnnnnnnnnnnnnnnnnnnnnnnnnnnnnnnnnnnnnnnnnnnnnnnnnnnnnnnnnnnnnnnnnnnnnnnnnnnnnnnnnnnnnnnnnnnnnnnnnnnnnnnnnnnnnnnnnnnnnnnnnnnnnnnnnnnnnnnnnnnnnnnnnnnnnnnnnnnnnnnnnnnnnnnnnnnnnnnnnnnnnnnnnnnnnnnnnnnnnnnnnnnnnnnnnnnnnnnnnnnnnnnnnnnnnnnnnnnnnnnnnnnnnnnnnnnnnnnnnnnnnnnnnnnnnnnnnnnnnnnnnnnnnnnnnnnnnnnnnnnnnnnnnnnnnnnnnnnnnnnnnnnnnnnnnnnnnnnnnnnnnnnnnnnnnnnnnnnnnnnnnnnnnnnnnnnnnnnnnnnnnnnnnnnnnnnnnnnnnnnnnnnnnnnnnnnnnnnnnnnnnnnnnnnnnnnnnnnnnnnnnnnnnnnnnnnnnnnnnnnnnnnnnnnnnnnnnnnnnnnnnnnnnnnnnnnnnnnnnnnnnnnnnnnnnnnnnnnnnnnnnnnnnnnnnnnnnnnnnnnnnnnnnnnnnnnnnnnnnnnnnnnnnnnnnnnnnnnnnnnnnnnnnnnnnnnnnnnnnnnnnnnnnnnnnnnnnnnnnnnnnnnnnnnnnnnnnnnnnnnnnnnnnnnnnnnnnnnnnnnnnnnnnnnnnnnnnnnnnnnnnnnnnnnnnnnnnnnnnnnnnnnnnnnnnnnnnnnnnnnnnnnnnnnnnnnnnnnnnnnnnnnnnnnnnnnnnnnnnnnnnnnnnnnnnnnnnnnnnnnnnnnnnnnnnnnnnnnnnnnnnnnnnnnnnnnnnnnnnnnnnnnnnnnnnnnnnnnnnnnnnnnnnnnnnnnnnnnnnnnnnnnnnnnnnnnnnnnnnnnnnnnnnnnnnnnnnnnnnnnnnnnnnnnnnnnnnnnnnnnnnnnnnnnnnnnnnnnnnnnnnnnnnnnnnnnnnnnnnnnnnnnnnnnnnnnnnnnnnnnnnnnnnnnnnnnnnnnnnnnnnnnnnnnnnnnnnnnnnnnnnnnnnnnnnnnnnnnnnnnnnnnnnnnnnnnnnnnnnnnnnnnnnnnnnnnnnnnnnnnnnnnnnnnnnnnnnnnnnnnnnnnnnnnnnnnnnnnnnnnnnnnnnnnnnnnnnnnnnnnnnnnnnnnnnnnnnnnnnnnnnnnnnnnnnnnnnnnnnnnnnnnnnnnnnnnnnnnnnnnnnnnnnnnnnnnnnnnnnnnnnnnnnnnnnnnnnnnnnnnnnnnnnnnnnnnnnnnnnnnnnnnnnnnnnnnnnnnnnnnnnnnnnnnnnnnnnnnnnnnnnnnnnnnnnnnnnnnnnnnnnnnnnnnnnnnnnnnnnnnnnnnnnnnnnnnnnnnnnnnnnnnnnnnnnnnnnnnnnnnnnnnnnnnnnnnnnnnnnnnnnnnnnnnnnnnnnnnnnnnnnnnnnnnnnnnnnnnnnnnnnnnnnnnnnnnnnnnnnnnnnnnnnnnnnnnnnnnnnnnnnnnnnnnnnnnnnnnnnnnnnnnnnnnnnnnnnnnnnnnnnnnnnnnnnnnnnnnnnnnnnnnnnnnnnnnnnnnnnnnnnnnnnnnnnnnnnnnnnnnnnnnnnnnnnnnnnnnnnnnnnnnnnnnnnnnnnnnnnnnnnnnnnnnnnnnnnnnnnnnnnnnnnnnnnnnnnnnnnnnnnnnnnnnnnnnnnnnnnnnnnnnnnnnnnnnnnnnnnnnnnnnnnnnnnnnnnnnnnnnnnnnnnnnnnnnnnnnnnnnnnnnnnnnnnnnnnnnnnnnnnnnnnnnnnnnnnnnnnnnnnnnnnnnnnnnnnnnnnnnnnnnnnnnnnnnnnnnnnnnnnnnnnnnnnnnnnnnnnnnnnnnnnnnnnnnnnnnnnnnnnnnnnnnnnnnnnnnnnnnnnnnnnnnnnnnnnnnnnnnnnnnnnnnnnnnnnnnnnnnnnnnnnnnnnnnnnnnnnnnnnnnnnnnnnnnnnnnnnnnnnnnnnnnnnnnnnnnnnnnnnnnnnnnnnnnnnnnnnnnnnnnnnnnnnnnnnnnnnnnnnnnnnnnnnnnnnnnnnnnnnnnnnnnnnnnnnnnnnnnnnnnnnnnnnnnnnnnnnnnnnnnnnnnnnnnnnnnnnnnnnnnnnnnnnnnnnnnnnnnnnnnnnn

SEQ ID NO: 5066-5132 - skipped (67 entries)

SEQ ID NO: 5133 - DNA, 25 bp, synthetic construct
  source 1..25: mol_type = other DNA
  modified_base 7: mod_base = OTHER; note = A nucleoside-replacement group characterized by the lack of a nucleotide base
  modified_base 19: mod_base = OTHER; note = A nucleoside-replacement group characterized by the lack of a nucleotide base
gggcagncaggaatggtgngtggaa

SEQ ID NO: 5134 - DNA, 25 bp, synthetic construct
  source 1..25: mol_type = other DNA
  modified_base 7: mod_base = OTHER; note = A nucleoside-replacement group characterized by the lack of a nucleotide base
  modified_base 19: mod_base = OTHER; note = A nucleoside-replacement group characterized by the lack of a nucleotide base
agggagnagttttccaggnaaaggg

SEQ ID NO: 5135 - DNA, 25 bp, synthetic construct
  source 1..25: mol_type = other DNA
  modified_base 7: mod_base = OTHER; note = A nucleoside-replacement group characterized by the lack of a nucleotide base
  modified_base 19: mod_base = OTHER; note = A nucleoside-replacement group characterized by the lack of a nucleotide base
gcagctngaagagacatanccagac

SEQ ID NO: 5136 - DNA, 25 bp, synthetic construct
  source 1..25: mol_type = other DNA
  modified_base 7: mod_base = OTHER; note = A nucleoside-replacement group characterized by the lack of a nucleotide base
  modified_base 19: mod_base = OTHER; note = A nucleoside-replacement group characterized by the lack of a nucleotide base
tccaccngccactcacaancatcca

SEQ ID NO: 5137 - DNA, 25 bp, synthetic construct
  source 1..25: mol_type = other DNA
  modified_base 7: mod_base = OTHER; note = A nucleoside-replacement group characterized by the lack of a nucleotide base
  modified_base 19: mod_base = OTHER; note = A nucleoside-replacement group characterized by the lack of a nucleotide base
gaaagtntcatggagagtncaaggg

SEQ ID NO: 5138 - DNA, 25 bp, synthetic construct
  source 1..25: mol_type = other DNA
  modified_base 9: mod_base = OTHER; note = A nucleoside-replacement group characterized by the lack of a nucleotide base
  modified_base 19: mod_base = OTHER; note = A nucleoside-replacement group characterized by the lack of a nucleotide base
gggcaggcnggaatggtgngtggaa

SEQ ID NO: 5139 - DNA, 25 bp, synthetic construct
  source 1..25: mol_type = other DNA
  modified_base 9: mod_base = OTHER; note = A nucleoside-replacement group characterized by the lack of a nucleotide base
  modified_base 19: mod_base = OTHER; note = A nucleoside-replacement group characterized by the lack of a nucleotide base
agggagganttttccaggnaaaggg

SEQ ID NO: 5140 - DNA, 25 bp, synthetic construct
  source 1..25: mol_type = other DNA
  modified_base 9: mod_base = OTHER; note = A nucleoside-replacement group characterized by the lack of a nucleotide base
  modified_base 19: mod_base = OTHER; note = A nucleoside-replacement group characterized by the lack of a nucleotide base
gcagctggnagagacatanccagac

SEQ ID NO: 5141 - DNA, 25 bp, synthetic construct
  source 1..25: mol_type = other DNA
  modified_base 9: mod_base = OTHER; note = A nucleoside-replacement group characterized by the lack of a nucleotide base
  modified_base 19: mod_base = OTHER; note = A nucleoside-replacement group characterized by the lack of a nucleotide base
tccaccagncactcacaancatcca

SEQ ID NO: 5142 - DNA, 25 bp, synthetic construct
  source 1..25: mol_type = other DNA
  modified_base 9: mod_base = OTHER; note = A nucleoside-replacement group characterized by the lack of a nucleotide base
  modified_base 19: mod_base = OTHER; note = A nucleoside-replacement group characterized by the lack of a nucleotide base
gaaagtgtnatggagagtncaaggg

SEQ ID NO: 5143 - DNA, 23 bp, synthetic construct
  source 1..23: mol_type = other DNA
  modified_base 8: mod_base = OTHER; note = A nucleoside-replacement group characterized by the lack of a nucleotide base
  modified_base 16: mod_base = OTHER; note = A nucleoside-replacement group characterized by the lack of a nucleotide base
gcaggcangaatggtnagtggaa

SEQ ID NO: 5144 - DNA, 23 bp, synthetic construct
  source 1..23: mol_type = other DNA
  modified_base 8: mod_base = OTHER; note = A nucleoside-replacement group characterized by the lack of a nucleotide base
  modified_base 16: mod_base = OTHER; note = A nucleoside-replacement group characterized by the lack of a nucleotide base
gggcaggnaggaatgntgagtgg

SEQ ID NO: 5145 - DNA, 23 bp, synthetic construct
  source 1..23: mol_type = other DNA
  modified_base 8: mod_base = OTHER; note = A nucleoside-replacement group characterized by the lack of a nucleotide base
  modified_base 16: mod_base = OTHER; note = A nucleoside-replacement group characterized by the lack of a nucleotide base
ggcaggcnggaatggngagtgga

SEQ ID NO: 5146 - DNA, 23 bp, synthetic construct
  source 1..23: mol_type = other DNA
  modified_base 8: mod_base = OTHER; note = A nucleoside-replacement group characterized by the lack of a nucleotide base
  modified_base 16: mod_base = OTHER; note = A nucleoside-replacement group characterized by the lack of a nucleotide base
gtaaaggnaatggcanggcgggc

SEQ ID NO: 5147 - DNA, 23 bp, synthetic construct
  source 1..23: mol_type = other DNA
  modified_base 8: mod_base = OTHER; note = A nucleoside-replacement group characterized by the lack of a nucleotide base
  modified_base 16: mod_base = OTHER; note = A nucleoside-replacement group characterized by the lack of a nucleotide base
aggtaaanggaatggnatggcgg

SEQ ID NO: 5148 - DNA, 23 bp, synthetic construct
  source 1..23: mol_type = other DNA
  modified_base 8: mod_base = OTHER; note = A nucleoside-replacement group characterized by the lack of a nucleotide base
  modified_base 16: mod_base = OTHER; note = A nucleoside-replacement group characterized by the lack of a nucleotide base
ggtaaagngaatggcntggcggg

SEQ ID NO: 5149 - DNA, 23 bp, synthetic construct
  source 1..23: mol_type = other DNA
  modified_base 8: mod_base = OTHER; note = A nucleoside-replacement group characterized by the lack of a nucleotide base
  modified_base 16: mod_base = OTHER; note = A nucleoside-replacement group characterized by the lack of a nucleotide base
aggaggtnaccctgantctggac

SEQ ID NO: 5150 - DNA, 23 bp, synthetic construct
  source 1..23: mol_type = other DNA
  modified_base 8: mod_base = OTHER; note = A nucleoside-replacement group characterized by the lack of a nucleotide base
  modified_base 16: mod_base = OTHER; note = A nucleoside-replacement group characterized by the lack of a nucleotide base
agaggagntgaccctnaatctgg

SEQ ID NO: 5151 - DNA, 23 bp, synthetic construct
  source 1..23: mol_type = other DNA
  modified_base 8: mod_base = OTHER; note = A nucleoside-replacement group characterized by the lack of a nucleotide base
  modified_base 16: mod_base = OTHER; note = A nucleoside-replacement group characterized by the lack of a nucleotide base
gaggaggngaccctgnatctgga

SEQ ID NO: 5152 - DNA, 23 bp, synthetic construct
  source 1..23: mol_type = other DNA
  modified_base 8: mod_base = OTHER; note = A nucleoside-replacement group characterized by the lack of a nucleotide base
  modified_base 16: mod_base = OTHER; note = A nucleoside-replacement group characterized by the lack of a nucleotide base
acaaacgncccaatcntgagtgg

SEQ ID NO: 5153 - DNA, 23 bp, synthetic construct
  source 1..23: mol_type = other DNA
  modified_base 8: mod_base = OTHER; note = A nucleoside-replacement group characterized by the lack of a nucleotide base
  modified_base 16: mod_base = OTHER; note = A nucleoside-replacement group characterized by the lack of a nucleotide base
acacaaanggcccaancctgagt

SEQ ID NO: 5154 - DNA, 23 bp, synthetic construct
  source 1..23: mol_type = other DNA
  modified_base 8: mod_base = OTHER; note = A nucleoside-replacement group characterized by the lack of a nucleotide base
  modified_base 16: mod_base = OTHER; note = A nucleoside-replacement group characterized by the lack of a nucleotide base
cacaaacngcccaatnctgagtg

SEQ ID NO: 5155 - DNA, 23 bp, synthetic construct
  source 1..23: mol_type = other DNA
  modified_base 8: mod_base = OTHER; note = A nucleoside-replacement group characterized by the lack of a nucleotide base
  modified_base 16: mod_base = OTHER; note = A nucleoside-replacement group characterized by the lack of a nucleotide base
tctttccnggaaaccnaggcagc

SEQ ID NO: 5156 - DNA, 23 bp, synthetic construct
  source 1..23: mol_type = other DNA
  modified_base 8: mod_base = OTHER; note = A nucleoside-replacement group characterized by the lack of a nucleotide base
  modified_base 16: mod_base = OTHER; note = A nucleoside-replacement group characterized by the lack of a nucleotide base
gttctttncaggaaanccaggca

SEQ ID NO: 5157 - DNA, 23 bp, synthetic construct
  source 1..23: mol_type = other DNA
  modified_base 8: mod_base = OTHER; note = A nucleoside-replacement group characterized by the lack of a nucleotide base
  modified_base 16: mod_base = OTHER; note = A nucleoside-replacement group characterized by the lack of a nucleotide base
ttctttcnaggaaacncaggcag

SEQ ID NO: 5158 - DNA, 23 bp, synthetic construct
  source 1..23: mol_type = other DNA
  modified_base 8: mod_base = OTHER; note = A nucleoside-replacement group characterized by the lack of a nucleotide base
  modified_base 16: mod_base = OTHER; note = A nucleoside-replacement group characterized by the lack of a nucleotide base
tccgcaanttaatccncctaccc

SEQ ID NO: 5159 - DNA, 23 bp, synthetic construct
  source 1..23: mol_type = other DNA
  modified_base 8: mod_base = OTHER; note = A nucleoside-replacement group characterized by the lack of a nucleotide base
  modified_base 16: mod_base = OTHER; note = A nucleoside-replacement group characterized by the lack of a nucleotide base
gatccgcnacttaatncacctac

SEQ ID NO: 5160 - DNA, 23 bp, synthetic construct
  source 1..23: mol_type = other DNA
  modified_base 8: mod_base = OTHER; note = A nucleoside-replacement group characterized by the lack of a nucleotide base
  modified_base 16: mod_base = OTHER; note = A nucleoside-replacement group characterized by the lack of a nucleotide base
atccgcancttaatcnacctacc

SEQ ID NO: 5161 - DNA, 23 bp, synthetic construct
  source 1..23: mol_type = other DNA
  modified_base 8: mod_base = OTHER; note = A nucleoside-replacement group characterized by the lack of a nucleotide base
  modified_base 16: mod_base = OTHER; note = A nucleoside-replacement group characterized by the lack of a nucleotide base
cccacccntctaactnccccaaa

SEQ ID NO: 5162 - DNA, 23 bp, synthetic construct
  source 1..23: mol_type = other DNA
  modified_base 8: mod_base = OTHER; note = A nucleoside-replacement group characterized by the lack of a nucleotide base
  modified_base 16: mod_base = OTHER; note = A nucleoside-replacement group characterized by the lack of a nucleotide base
cacccacncatctaantacccca

SEQ ID NO: 5163 - DNA, 23 bp, synthetic construct
  source 1..23: mol_type = other DNA
  modified_base 8: mod_base = OTHER; note = A nucleoside-replacement group characterized by the lack of a nucleotide base
  modified_base 16: mod_base = OTHER; note = A nucleoside-replacement group characterized by the lack of a nucleotide base
acccaccnatctaacnaccccaa

SEQ ID NO: 5164 - DNA, 23 bp, synthetic construct
  source 1..23: mol_type = other DNA
  modified_base 8: mod_base = OTHER; note = A nucleoside-replacement group characterized by the lack of a nucleotide base
  modified_base 16: mod_base = OTHER; note = A nucleoside-replacement group characterized by the lack of a nucleotide base
aagtgtcntggagagngcaaggg

SEQ ID NO: 5165 - DNA, 23 bp, synthetic construct
  source 1..23: mol_type = other DNA
  modified_base 8: mod_base = OTHER; note = A nucleoside-replacement group characterized by the lack of a nucleotide base
  modified_base 16: mod_base = OTHER; note = A nucleoside-replacement group characterized by the lack of a nucleotide base
gaaagtgncatggagngtgcaag

SEQ ID NO: 5166 - DNA, 23 bp, synthetic construct
  source 1..23: mol_type = other DNA
  modified_base 8: mod_base = OTHER; note = A nucleoside-replacement group characterized by the lack of a nucleotide base
  modified_base 16: mod_base = OTHER; note = A nucleoside-replacement group characterized by the lack of a nucleotide base
aaagtgtnatggagantgcaagg

SEQ ID NO: 5167 - DNA, 20 bp, synthetic construct
  source 1..20: mol_type = other DNA
  misc_feature 1..20: note = Phosphorothioate linkage
  modified_base 1..5: mod_base = OTHER; note = 2'-O-(2-methoxyethyl) ribonucleotide
  misc_feature 1..5: note = RNA
  modified_base 5: mod_base = OTHER; note = 5-methyl cytosine
  misc_feature 6..15: note = DNA
  modified_base 8: mod_base = OTHER; note = 5-methyl cytosine
  modified_base 16..20: mod_base = OTHER; note = 2'-O-(2-methoxyethyl) ribonucleotide
  misc_feature 16..20: note = RNA
  modified_base 17: mod_base = OTHER; note = 5-methyl cytosine
aaggcttcatattgtacttt

SEQ ID NO: 5168 - DNA, 25 bp, synthetic construct
  source 1..25: mol_type = other DNA
  modified_base 7: mod_base = OTHER; note = A nucleoside-replacement group characterized by the lack of a nucleotide base
  modified_base 19: mod_base = OTHER; note = A nucleoside-replacement group characterized by the lack of a nucleotide base
agttcanccacacatcctnccattc

SEQ ID NO: 5169 - DNA, 25 bp, synthetic construct
  source 1..25: mol_type = other DNA
  modified_base 9: mod_base = OTHER; note = A nucleoside-replacement group characterized by the lack of a nucleotide base
  modified_base 19: mod_base = OTHER; note = A nucleoside-replacement group characterized by the lack of a nucleotide base
agttcaacnacacatcctnccattc

SEQ ID NO: 5170 - DNA, 23 bp, synthetic construct
  source 1..23: mol_type = other DNA
  modified_base 8: mod_base = OTHER; note = A nucleoside-replacement group characterized by the lack of a nucleotide base
  modified_base 16: mod_base = OTHER; note = A nucleoside-replacement group characterized by the lack of a nucleotide base
gttcaacnacacatcnttccatt

SEQ ID NO: 5171 - DNA, 23 bp, synthetic construct
  source 1..23: mol_type = other DNA
  modified_base 8: mod_base = OTHER; note = A nucleoside-replacement group characterized by the lack of a nucleotide base
  modified_base 16: mod_base = OTHER; note = A nucleoside-replacement group characterized by the lack of a nucleotide base
agttcaancacacatncttccat

SEQ ID NO: 5172 - DNA, 23 bp, synthetic construct
  source 1..23: mol_type = other DNA
  modified_base 8: mod_base = OTHER; note = A nucleoside-replacement group characterized by the lack of a nucleotide base
  modified_base 16: mod_base = OTHER; note = A nucleoside-replacement group characterized by the lack of a nucleotide base
ttcaaccncacatccntccattc

SEQ ID NO: 5173 - DNA, 25 bp, synthetic construct
  source 1..25: mol_type = other DNA
  modified_base 7: mod_base = OTHER; note = A nucleoside-replacement group characterized by the lack of a nucleotide base
  modified_base 19: mod_base = OTHER; note = A nucleoside-replacement group characterized by the lack of a nucleotide base
cttgcantagttcaaccanacatcc

SEQ ID NO: 5174 - DNA, 25 bp, synthetic construct
  source 1..25: mol_type = other DNA
  modified_base 9: mod_base = OTHER; note = A nucleoside-replacement group characterized by the lack of a nucleotide base
  modified_base 19: mod_base = OTHER; note = A nucleoside-replacement group characterized by the lack of a nucleotide base
cttgcaatngttcaaccanacatcc

SEQ ID NO: 5175 - DNA, 23 bp, synthetic construct
  source 1..23: mol_type = other DNA
  modified_base 8: mod_base = OTHER; note = A nucleoside-replacement group characterized by the lack of a nucleotide base
  modified_base 16: mod_base = OTHER; note = A nucleoside-replacement group characterized by the lack of a nucleotide base
ttgcaatngttcaacnacacatc

SEQ ID NO: 5176 - DNA, 23 bp, synthetic construct
  source 1..23: mol_type = other DNA
  modified_base 8: mod_base = OTHER; note = A nucleoside-replacement group characterized by the lack of a nucleotide base
  modified_base 16: mod_base = OTHER; note = A nucleoside-replacement group characterized by the lack of a nucleotide base
cttgcaanagttcaancacacat

SEQ ID NO: 5177 - DNA, 23 bp, synthetic construct
  source 1..23: mol_type = other DNA
  modified_base 8: mod_base = OTHER; note = A nucleoside-replacement group characterized by the lack of a nucleotide base
  modified_base 16: mod_base = OTHER; note = A nucleoside-replacement group characterized by the lack of a nucleotide base
tgcaatanttcaaccncacatcc

SEQ ID NO: 5178 - DNA, 25 bp, synthetic construct
  source 1..25: mol_type = other DNA
  modified_base 7: mod_base = OTHER; note = A nucleoside-replacement group characterized by the lack of a nucleotide base
  modified_base 19: mod_base = OTHER; note = A nucleoside-replacement group characterized by the lack of a nucleotide base
acacatncatccatccatncattca

SEQ ID NO: 5179 - DNA, 25 bp, synthetic construct
  source 1..25: mol_type = other DNA
  modified_base 9: mod_base = OTHER; note = A nucleoside-replacement group characterized by the lack of a nucleotide base
  modified_base 19: mod_base = OTHER; note = A nucleoside-replacement group characterized by the lack of a nucleotide base
acacatccntccatccatncattca

SEQ ID NO: 5180 - DNA, 23 bp, synthetic construct
  source 1..23: mol_type = other DNA
  modified_base 8: mod_base = OTHER; note = A nucleoside-replacement group characterized by the lack of a nucleotide base
  modified_base 16: mod_base = OTHER; note = A nucleoside-replacement group characterized by the lack of a nucleotide base
cacatccntccatccntccattc

SEQ ID NO: 5181 - DNA, 23 bp, synthetic construct
  source 1..23: mol_type = other DNA
  modified_base 8: mod_base = OTHER; note = A nucleoside-replacement group characterized by the lack of a nucleotide base
  modified_base 16: mod_base = OTHER; note = A nucleoside-replacement group characterized by the lack of a nucleotide base
acacatcnatccatcnatccatt

SEQ ID NO: 5182 - DNA, 23 bp, synthetic construct
  source 1..23: mol_type = other DNA
  modified_base 8: mod_base = OTHER; note = A nucleoside-replacement group characterized by the lack of a nucleotide base
  modified_base 16: mod_base = OTHER; note = A nucleoside-replacement group characterized by the lack of a nucleotide base
acatccanccatccanccattca

SEQ ID NO: 5183 - DNA, 25 bp, synthetic construct
  source 1..25: mol_type = other DNA
  modified_base 7: mod_base = OTHER; note = A nucleoside-replacement group characterized by the lack of a nucleotide base
  modified_base 19: mod_base = OTHER; note = A nucleoside-replacement group characterized by the lack of a nucleotide base
cagtaantcaaccacacanccatcc

SEQ ID NO: 5184 - DNA, 25 bp, synthetic construct
  source 1..25: mol_type = other DNA
  modified_base 9: mod_base = OTHER; note = A nucleoside-replacement group characterized by the lack of a nucleotide base
  modified_base 19: mod_base = OTHER; note = A nucleoside-replacement group characterized by the lack of a nucleotide base
cagtaattnaaccacacanccatcc

SEQ ID NO: 5185 - DNA, 23 bp, synthetic construct
  source 1..23: mol_type = other DNA
  modified_base 8: mod_base = OTHER; note = A nucleoside-replacement group characterized by the lack of a nucleotide base
  modified_base 16: mod_base = OTHER; note = A nucleoside-replacement group characterized by the lack of a nucleotide base
agtaattnaaccacanatccatc

SEQ ID NO: 5186 - DNA, 23 bp, synthetic construct
  source 1..23: mol_type = other DNA
  modified_base 8: mod_base = OTHER; note = A nucleoside-replacement group characterized by the lack of a nucleotide base
  modified_base 16: mod_base = OTHER; note = A nucleoside-replacement group characterized by the lack of a nucleotide base
cagtaatncaaccacncatccat

SEQ ID NO: 5187 - DNA, 23 bp, synthetic construct
  source 1..23: mol_type = other DNA
  modified_base 8: mod_base = OTHER; note = A nucleoside-replacement group characterized by the lack of a nucleotide base
  modified_base 16: mod_base = OTHER; note = A nucleoside-replacement group characterized by the lack of a nucleotide base
gtaattcnaccacacntccatcc

SEQ ID NO: 5188 - DNA, 25 bp, synthetic construct
  source 1..25: mol_type = other DNA
  modified_base 7: mod_base = OTHER; note = A nucleoside-replacement group characterized by the lack of a nucleotide base
  modified_base 19: mod_base = OTHER; note = A nucleoside-replacement group characterized by the lack of a nucleotide base
acctttnagtaattcaacnacacat

SEQ ID NO: 5189 - DNA, 25 bp, synthetic construct
  source 1..25: mol_type = other DNA
  modified_base 9: mod_base = OTHER; note = A nucleoside-replacement group characterized by the lack of a nucleotide base
  modified_base 19: mod_base = OTHER; note = A nucleoside-replacement group characterized by the lack of a nucleotide base
acctttcantaattcaacnacacat

SEQ ID NO: 5190 - DNA, 23 bp, synthetic construct
  source 1..23: mol_type = other DNA
  modified_base 8: mod_base = OTHER; note = A nucleoside-replacement group characterized by the lack of a nucleotide base
  modified_base 16: mod_base = OTHER; note = A nucleoside-replacement group characterized by the lack of a nucleotide base
cctttcantaattcanccacaca

SEQ ID NO: 5191 - DNA, 23 bp, synthetic construct
  source 1..23: mol_type = other DNA
  modified_base 8: mod_base = OTHER; note = A nucleoside-replacement group characterized by the lack of a nucleotide base
  modified_base 16: mod_base = OTHER; note = A nucleoside-replacement group characterized by the lack of a nucleotide base
acctttcngtaattcnaccacac

SEQ ID NO: 5192 - DNA, 23 bp, synthetic construct
  source 1..23: mol_type = other DNA
  modified_base 8: mod_base = OTHER; note = A nucleoside-replacement group characterized by the lack of a nucleotide base
  modified_base 16: mod_base = OTHER; note = A nucleoside-replacement group characterized by the lack of a nucleotide base
ctttcagnaattcaancacacat

SEQ ID NO: 5193 - DNA, 25 bp, synthetic construct
  source 1..25: mol_type = other DNA
  modified_base 7: mod_base = OTHER; note = A nucleoside-replacement group characterized by the lack of a nucleotide base
  modified_base 19: mod_base = OTHER; note = A nucleoside-replacement group characterized by the lack of a nucleotide base
ctctttnatccatccacanacccac

SEQ ID NO: 5194 - DNA, 25 bp, synthetic construct
  source 1..25: mol_type = other DNA
  modified_base 9: mod_base = OTHER; note = A nucleoside-replacement group characterized by the lack of a nucleotide base
  modified_base 19: mod_base = OTHER; note = A nucleoside-replacement group characterized by the lack of a nucleotide base
ctcttttanccatccacanacccac

SEQ ID NO: 5195 - DNA, 23 bp, synthetic construct
  source 1..23: mol_type = other DNA
  modified_base 8: mod_base = OTHER; note = A nucleoside-replacement group characterized by the lack of a nucleotide base
  modified_base 16: mod_base = OTHER; note = A nucleoside-replacement group characterized by the lack of a nucleotide base
tcttttanccatccanacaccca

SEQ ID NO: 5196 - DNA, 23 bp, synthetic construct
  source 1..23: mol_type = other DNA
  modified_base 8: mod_base = OTHER; note = A nucleoside-replacement group characterized by the lack of a nucleotide base
  modified_base 16: mod_base = OTHER; note = A nucleoside-replacement group characterized by the lack of a nucleotide base
ctcttttntccatccncacaccc

SEQ ID NO: 5197 - DNA, 23 bp, synthetic construct
  source 1..23: mol_type = other DNA
  modified_base 8: mod_base = OTHER; note = A nucleoside-replacement group characterized by the lack of a nucleotide base
  modified_base 16: mod_base = OTHER; note = A nucleoside-replacement group characterized by the lack of a nucleotide base
cttttatncatccacncacccac

SEQ ID NO: 5198 - DNA, 25 bp, synthetic construct
  source 1..25: mol_type = other DNA
  modified_base 7: mod_base = OTHER; note = A nucleoside-replacement group characterized by the lack of a nucleotide base
  modified_base 19: mod_base = OTHER; note = A nucleoside-replacement group characterized by the lack of a nucleotide base
atctacncttttatccatncacaca

SEQ ID NO: 5199 - DNA, 25 bp, synthetic construct
  source 1..25: mol_type = other DNA
  modified_base 9: mod_base = OTHER; note = A nucleoside-replacement group characterized by the lack of a nucleotide base
  modified_base 19: mod_base = OTHER; note = A nucleoside-replacement group characterized by the lack of a nucleotide base
atctactcntttatccatncacaca

SEQ ID NO: 5200 - DNA, 23 bp, synthetic construct
  source 1..23: mol_type = other DNA
  modified_base 8: mod_base = OTHER; note = A nucleoside-replacement group characterized by the lack of a nucleotide base
  modified_base 16: mod_base = OTHER; note = A nucleoside-replacement group characterized by the lack of a nucleotide base
tctactcntttatccntccacac

SEQ ID NO: 5201 - DNA, 23 bp, synthetic construct
  source 1..23: mol_type = other DNA
  modified_base 8: mod_base = OTHER; note = A nucleoside-replacement group characterized by the lack of a nucleotide base
  modified_base 16: mod_base = OTHER; note = A nucleoside-replacement group characterized by the lack of a nucleotide base
atctactnttttatcnatccaca

SEQ ID NO: 5202 - DNA, 23 bp, synthetic construct
  source 1..23: mol_type = other DNA
  modified_base 8: mod_base = OTHER; note = A nucleoside-replacement group characterized by the lack of a nucleotide base
  modified_base 16: mod_base = OTHER; note = A nucleoside-replacement group characterized by the lack of a nucleotide base
ctactctnttatccanccacaca

SEQ ID NO: 5203 - DNA, 18 bp, synthetic construct
  source 1..18: mol_type = other DNA
attgttctgcacgtcggt

SEQ ID NO: 5204 - DNA, 21 bp, synthetic construct
  source 1..21: mol_type = other DNA
gtctgggtatgtctcttccag

SEQ ID NO: 5205 - DNA, 24 bp, synthetic construct
  source 1..24: mol_type = other DNA
agttctttccaggaaacccaggca

SEQ ID NO: 5206 - DNA, 1289 bp, synthetic construct
  source 1..1289: mol_type = other DNA
ttctgccaccatgggagagaaagtgtcatggagagtgcaaggggtcgccgggggtcagaggtcccagggtctggggcagcttacatcatccatctgcctgtttattcattaattcattcatctactcttttatccatccacacacccacccatctaactaccccaaatttcacccatccactcttccaacctttcagtaattcaaccacacatccatccatccatccattcatccatcccatacattgatccgcaacttaatccacctacccaatcattcattctttcatacaaccaaccatccatccacccatcaatttatccaaccatccatttttcgtctgtccaccagccactcacaaccatccatctaaatattcagaaattatgaacccaattatcaatacttgcaatagttcaaccacacatccttccattcatccacccacccattcatccatttgtccatctgcctatcatccatccatccatccatccatctacctatctacccatctgactatcaacaaattcacctatctactcaatcttccttctaataactcaaccacacttccatccatcccatccaatacaacttaatctgctcatccaacatttcatctatccacccagtcaatcatctatccagcaatctatctatccactcatcaagttatccatccatcattcatctatactcatccatcatctaacaattacccccaaattcacccatccatacatctatactttcaatagttcaatcatatatccatccatctgtccatccatccatcatccatctagccacgaatctacccaccaactcatccatctatccatccatgtactcacccatctctccatccatccttttatctactcatcactcattcatctgttcaatcattcattcattcaccagcatttattcaacaaactagttcctggggataagagttctttccaggaaacccaggcagctggaagagacatacccagacacaaacggcccaatcctgagtggttagggctggaatagaaggaagaacctgatgatgagtagtgagagtcaacctggaggccaaggtgggcttcccagaggaggtgaccctgaatctggactttgatggatagggaggagttttccaggtaaagggaatggcatggcgggcagtctcagagggccaggagagtgtggatggtgtggccagaaagaggaagagctgggcaggcaggaatggtgagtggaagtggcatgggaggggccgagcaatgaccctcac

SEQ ID NO: 5207 - DNA, 178 bp, synthetic construct
  source 1..178: mol_type = other DNA
ccatctctccatccatccttttatctactcatcactcattcatctgttcaatcattcattcattcaccagcatttattcaacaaactagttcctggggataagagttctttccaggaaacccaggcagctggaagagacatacccagacacaaacggcccaatcctgagtggttaggg

SEQ ID NO: 5208 - DNA, 128 bp, synthetic construct
  source 1..128: mol_type = other DNA
ccatctctccatccatccttttatctactcatcactcattcatctgttcaatcattcattcattcaccagcatttattcaacaaactagttcctggggataagagttctttccaggaaacccaggcag

SEQ ID NO: 5209 - DNA, 21 bp, synthetic construct
  source 1..21: mol_type = other DNA
tctttccaggaaacccaggca

SEQ ID NO: 5210 - DNA, 20 bp, synthetic construct
  source 1..20: mol_type = other DNA
ctttccaggaaacccaggca

SEQ ID NO: 5211 - DNA, 20 bp, synthetic construct
  source 1..20: mol_type = other DNA
tctttccaggaaacccaggc

SEQ ID NO: 5212 - DNA, 19 bp, synthetic construct
  source 1..19: mol_type = other DNA
tttccaggaaacccaggca

SEQ ID NO: 5213 - DNA, 19 bp, synthetic construct
  source 1..19: mol_type = other DNA
tctttccaggaaacccagg

SEQ ID NO: 5214 - DNA, 18 bp, synthetic construct
  source 1..18: mol_type = other DNA
ttccaggaaacccaggca

SEQ ID NO: 5215 - DNA, 18 bp, synthetic construct
  source 1..18: mol_type = other DNA
tctttccaggaaacccag

SEQ ID NO: 5216 - DNA, 17 bp, synthetic construct
  source 1..17: mol_type = other DNA
tccaggaaacccaggca

SEQ ID NO: 5217 - DNA, 17 bp, synthetic construct
  source 1..17: mol_type = other DNA
tctttccaggaaaccca

SEQ ID NO: 5218 - DNA, 16 bp, synthetic construct
  source 1..16: mol_type = other DNA
ccaggaaacccaggca

SEQ ID NO: 5219 - DNA, 16 bp, synthetic construct
  source 1..16: mol_type = other DNA
tctttccaggaaaccc

SEQ ID NO: 5220 - DNA, 15 bp, synthetic construct
  source 1..15: mol_type = other DNA
caggaaacccaggca

SEQ ID NO: 5221 - DNA, 15 bp, synthetic construct
  source 1..15: mol_type = other DNA
tctttccaggaaacc

SEQ ID NO: 5222 - DNA, 21 bp, Homo sapiens
  source 1..21: mol_type = genomic DNA
tgcctgggtttcctggaaaga

SEQ ID NO: 5223 - DNA, 20 bp, Homo sapiens
  source 1..20: mol_type = genomic DNA
tgcctgggtttcctggaaag

SEQ ID NO: 5224 - DNA, 20 bp, Homo sapiens
  source 1..20: mol_type = genomic DNA
gcctgggtttcctggaaaga

SEQ ID NO: 5225 - DNA, 19 bp, Homo sapiens
  source 1..19: mol_type = genomic DNA
tgcctgggtttcctggaaa

SEQ ID NO: 5226 - DNA, 19 bp, Homo sapiens
  source 1..19: mol_type = genomic DNA
cctgggtttcctggaaaga

SEQ ID NO: 5227 - DNA, 18 bp, Homo sapiens
  source 1..18: mol_type = genomic DNA
tgcctgggtttcctggaa

SEQ ID NO: 5228 - DNA, 18 bp, Homo sapiens
  source 1..18: mol_type = genomic DNA
ctgggtttcctggaaaga

SEQ ID NO: 5229 - DNA, 17 bp, Homo sapiens
  source 1..17: mol_type = genomic DNA
tgcctgggtttcctgga

SEQ ID NO: 5230 - DNA, 17 bp, Homo sapiens
  source 1..17: mol_type = genomic DNA
tgggtttcctggaaaga

SEQ ID NO: 5231 - DNA, 16 bp, Homo sapiens
  source 1..16: mol_type = genomic DNA
tgcctgggtttcctgg

SEQ ID NO: 5232 - DNA, 16 bp, Homo sapiens
  source 1..16: mol_type = genomic DNA
gggtttcctggaaaga

SEQ ID NO: 5233 - DNA, 15 bp, Homo sapiens
  source 1..15: mol_type = genomic DNA
tgcctgggtttcctg

SEQ ID NO: 5234 - DNA, 15 bp, Homo sapiens
  source 1..15: mol_type = genomic DNA
ggtttcctggaaaga

SEQ ID NO: 5235 - DNA, 23 bp, synthetic construct
  source 1..23: mol_type = other DNA
  modified_base 1..23: mod_base = OTHER; note = 2'-O-(2-methoxyethyl) nucleotide phosphorothioate
  modified_base 8: mod_base = OTHER; note = A nucleoside-replacement group characterized by the lack of a nucleotide base
  modified_base 16: mod_base = OTHER; note = A nucleoside-replacement group characterized by the lack of a nucleotide base
  modified_base 6: mod_base = OTHER; note = 5-methyl cytosine
  modified_base 9..11: mod_base = OTHER; note = 5-methyl cytosine
  modified_base 15: mod_base = OTHER; note = 5-methyl cytosine
  modified_base 17: mod_base = OTHER; note = 5-methyl cytosine
  modified_base 21: mod_base = OTHER; note = 5-methyl cytosine
gagacatncccagacncaaacgg

SEQ ID NO: 5236 - DNA, 23 bp, synthetic construct
  source 1..23: mol_type = other DNA
  modified_base 1..23: mod_base = OTHER; note = 2'-O-(2-methoxyethyl) nucleotide phosphorothioate
  modified_base 8: mod_base = OTHER; note = A nucleoside-replacement group characterized by the lack of a nucleotide base
  modified_base 16: mod_base = OTHER; note = A nucleoside-replacement group characterized by the lack of a nucleotide base
  modified_base 3: mod_base = OTHER; note = 5-methyl cytosine
  modified_base 7: mod_base = OTHER; note = 5-methyl cytosine
  modified_base 9: mod_base = OTHER; note = 5-methyl cytosine
  modified_base 13: mod_base = OTHER; note = 5-methyl cytosine
  modified_base 15: mod_base = OTHER; note = 5-methyl cytosine
  modified_base 19: mod_base = OTHER; note = 5-methyl cytosine
  modified_base 22..23: mod_base = OTHER; note = 5-methyl cytosine
gacatacncagacacnaacggcc

SEQ ID NO: 5237 - DNA, 23 bp, synthetic construct
  source 1..23: mol_type = other DNA
  modified_base 1..23: mod_base = OTHER; note = 2'-O-(2-methoxyethyl) nucleotide phosphorothioate
  modified_base 8: mod_base = OTHER; note = A nucleoside-replacement group characterized by the lack of a nucleotide base
  modified_base 16: mod_base = OTHER; note = A nucleoside-replacement group characterized by the lack of a nucleotide base
  modified_base 4: mod_base = OTHER; note = 5-methyl cytosine
  modified_base 9..10: mod_base = OTHER; note = 5-methyl cytosine
  modified_base 14: mod_base = OTHER; note = 5-methyl cytosine
  modified_base 20: mod_base = OTHER; note = 5-methyl cytosine
  modified_base 23: mod_base = OTHER; note = 5-methyl cytosine
agacatanccagacanaaacggc

SEQ ID NO: 5238 - DNA, 23 bp, synthetic construct
  source 1..23: mol_type = other DNA
  modified_base 1..23: mod_base = OTHER; note = 2'-O-(2-methoxyethyl) nucleotide phosphorothioate
  modified_base 8: mod_base = OTHER; note = A nucleoside-replacement group characterized by the lack of a nucleotide base
  modified_base 16: mod_base = OTHER; note = A nucleoside-replacement group characterized by the lack of a nucleotide base
  modified_base 5: mod_base = OTHER; note = 5-methyl cytosine
  modified_base 9..11: mod_base = OTHER; note = 5-methyl cytosine
  modified_base 15: mod_base = OTHER; note = 5-methyl cytosine
  modified_base 17: mod_base = OTHER; note = 5-methyl cytosine
  modified_base 21: mod_base = OTHER; note = 5-methyl cytosine
gagacatncccagacncaaacgg

SEQ ID NO: 5239 - DNA, 23 bp, synthetic construct
  source 1..23: mol_type = other DNA
  modified_base 1..23: mod_base = OTHER; note = 2'-O-(2-methoxyethyl) nucleotide phosphorothioate
  modified_base 8: mod_base = OTHER; note = A nucleoside-replacement group characterized by the lack of a nucleotide base
  modified_base 16: mod_base = OTHER; note = A nucleoside-replacement group characterized by the lack of a nucleotide base
  modified_base 3: mod_base = OTHER; note = 5-methyl cytosine
  modified_base 7: mod_base = OTHER; note = 5-methyl cytosine
  modified_base 9: mod_base = OTHER; note = 5-methyl cytosine
  modified_base 13: mod_base = OTHER; note = 5-methyl cytosine
  modified_base 15: mod_base = OTHER; note = 5-methyl cytosine
  modified_base 19: mod_base = OTHER; note = 5-methyl cytosine
  modified_base 22..23: mod_base = OTHER; note = 5-methyl cytosine
gacatacncagacacnaacggcc

SEQ ID NO: 5240 - DNA, 23 bp, synthetic construct
  source 1..23: mol_type = other DNA
  modified_base 1..23: mod_base = OTHER; note = 2'-O-(2-methoxyethyl) nucleotide phosphorothioate
  modified_base 8: mod_base = OTHER; note = A nucleoside-replacement group characterized by the lack of a nucleotide base
  modified_base 16: mod_base = OTHER; note = A nucleoside-replacement group characterized by the lack of a nucleotide base
  modified_base 4: mod_base = OTHER; note = 5-methyl cytosine
  modified_base 9..10: mod_base = OTHER; note = 5-methyl cytosine
  modified_base 14: mod_base = OTHER; note = 5-methyl cytosine
  modified_base 20: mod_base = OTHER; note = 5-methyl cytosine
  modified_base 23: mod_base = OTHER; note = 5-methyl cytosine
agacatanccagacanaaacggc

SEQ ID NO: 5241 - DNA, 23 bp, synthetic construct
  source 1..23: mol_type = other DNA
  modified_base 1..23: mod_base = OTHER; note = 2'-O-(2-methoxyethyl) nucleotide phosphorothioate
  modified_base 8: mod_base = OTHER; note = A nucleoside-replacement group characterized by the lack of a nucleotide base
  modified_base 16: mod_base = OTHER; note = A nucleoside-replacement group characterized by the lack of a nucleotide base
  modified_base 4: mod_base = OTHER; note = 5-methyl cytosine
  modified_base 9..10: mod_base = OTHER; note = 5-methyl cytosine
  modified_base 14: mod_base = OTHER; note = 5-methyl cytosine
  modified_base 20: mod_base = OTHER; note = 5-methyl cytosine
  modified_base 23: mod_base = OTHER; note = 5-methyl cytosine
agacatanccagacanaaacggc

SEQ ID NO: 5242 - DNA, 23 bp, synthetic construct
  source 1..23: mol_type = other DNA
  modified_base 1..23: mod_base = OTHER; note = 2'-O-(2-methoxyethyl) nucleotide phosphorothioate
  modified_base 8: mod_base = OTHER; note = A nucleoside-replacement group characterized by the lack of a nucleotide base
  modified_base 16: mod_base = OTHER; note = A nucleoside-replacement group characterized by the lack of a nucleotide base
  modified_base 3: mod_base = OTHER; note = 5-methyl cytosine
  modified_base 7: mod_base = OTHER; note = 5-methyl cytosine
  modified_base 9: mod_base = OTHER; note = 5-methyl cytosine
  modified_base 13: mod_base = OTHER; note = 5-methyl cytosine
  modified_base 15: mod_base = OTHER; note = 5-methyl cytosine
  modified_base 19: mod_base = OTHER; note = 5-methyl cytosine
  modified_base 22..23: mod_base = OTHER; note = 5-methyl cytosine
gacatacncagacacnaacggcc

SEQ ID NO: 5243 - DNA, 23 bp, synthetic construct
  source 1..23: mol_type = other DNA
  modified_base 1..23: mod_base = OTHER; note = 2'-O-(2-methoxyethyl) nucleotide phosphorothioate
  modified_base 8: mod_base = OTHER; note = A nucleoside-replacement group characterized by the lack of a nucleotide base
  modified_base 16: mod_base = OTHER; note = A nucleoside-replacement group characterized by the lack of a nucleotide base
  modified_base 5: mod_base = OTHER; note = 5-methyl cytosine
  modified_base 9..11: mod_base = OTHER; note = 5-methyl cytosine
  modified_base 15: mod_base = OTHER; note = 5-methyl cytosine
  modified_base 17: mod_base = OTHER; note = 5-methyl cytosine
  modified_base 21: mod_base = OTHER; note = 5-methyl cytosine
gagacatncccagacncaaacgg

SEQ ID NO: 5244 - DNA, 25 bp, synthetic construct
  source 1..25: mol_type = other DNA
  modified_base 1..25: mod_base = OTHER; note = 2'-O-(2-methoxyethyl) nucleotide phosphorothioate
  modified_base 9: mod_base = OTHER; note = A nucleoside-replacement group characterized by the lack of a nucleotide base
  modified_base 19: mod_base = OTHER; note = A nucleoside-replacement group characterized by the lack of a nucleotide base
  modified_base 5: mod_base = OTHER; note = 5-methyl cytosine
  modified_base 10..11: mod_base = OTHER; note = 5-methyl cytosine
  modified_base 15: mod_base = OTHER; note = 5-methyl cytosine
  modified_base 17: mod_base = OTHER; note = 5-methyl cytosine
  modified_base 21: mod_base = OTHER; note = 5-methyl cytosine
  modified_base 24..25: mod_base = OTHER; note = 5-methyl cytosine
gagacatanccagacacanacggcc

SEQ ID NO: 5245 - DNA, 25 bp, synthetic construct
  source 1..25: mol_type = other DNA
  modified_base 1..25: mod_base = OTHER; note = 2'-O-(2-methoxyethyl) nucleotide phosphorothioate
  modified_base 7: mod_base = OTHER; note = A nucleoside-replacement group characterized by the lack of a nucleotide base
  modified_base 19: mod_base = OTHER; note = A nucleoside-replacement group characterized by the lack of a nucleotide base
  modified_base 5: mod_base = OTHER; note = 5-methyl cytosine
  modified_base 9..11: mod_base = OTHER; note = 5-methyl cytosine
  modified_base 15: mod_base = OTHER; note = 5-methyl cytosine
  modified_base 17: mod_base = OTHER; note = 5-methyl cytosine
  modified_base 21: mod_base = OTHER; note = 5-methyl cytosine
  modified_base 24..25: mod_base = OTHER; note = 5-methyl cytosine
gagacanacccagacacanacggcc

SEQ ID NO: 5246 - DNA, 23 bp, synthetic construct
  source 1..23: mol_type = other DNA
  modified_base 1..23: mod_base = OTHER; note = 2'-O-(2-methoxyethyl) nucleotide phosphorothioate
  modified_base 8: mod_base = OTHER; note = A nucleoside-replacement group characterized by the lack of a nucleotide base
  modified_base 16: mod_base = OTHER; note = A nucleoside-replacement group characterized by the lack of a nucleotide base
  modified_base 7: mod_base = OTHER; note = 5-methyl cytosine
  modified_base 11..13: mod_base = OTHER; note = 5-methyl cytosine
  modified_base 17: mod_base = OTHER; note = 5-methyl cytosine
  modified_base 19: mod_base = OTHER; note = 5-methyl cytosine
  modified_base 23: mod_base = OTHER; note = 5-methyl cytosine
aagagacntacccagncacaaac

SEQ ID NO: 5247 - DNA, 23 bp, synthetic construct
  source 1..23: mol_type = other DNA
  modified_base 1..23: mod_base = OTHER; note = 2'-O-(2-methoxyethyl) nucleotide phosphorothioate
  modified_base 8: mod_base = OTHER; note = A nucleoside-replacement group characterized by the lack of a nucleotide base
  modified_base 16: mod_base = OTHER; note = A nucleoside-replacement group characterized by the lack of a nucleotide base
  modified_base 6: mod_base = OTHER; note = 5-methyl cytosine
  modified_base 10..12: mod_base = OTHER; note = 5-methyl cytosine
  modified_base 18: mod_base = OTHER; note = 5-methyl cytosine
  modified_base 22: mod_base = OTHER; note = 5-methyl cytosine
agagacanacccaganacaaacg

SEQ ID NO: 5248 - DNA, 23 bp, synthetic construct
  source 1..23: mol_type = other DNA
  modified_base 1..23: mod_base = OTHER; note = 2'-O-(2-methoxyethyl) nucleotide phosphorothioate
  modified_base 8: mod_base = OTHER; note = A nucleoside-replacement group characterized by the lack of a nucleotide base
  modified_base 16: mod_base = OTHER; note = A nucleoside-replacement group characterized by the lack of a nucleotide base
  modified_base 12..14: mod_base = OTHER; note = 5-methyl cytosine
  modified_base 18: mod_base = OTHER; note = 5-methyl cytosine
  modified_base 20: mod_base = OTHER; note = 5-methyl cytosine
gaagaganatacccanacacaaa

SEQ ID NO: 5249 - DNA, 25 bp, synthetic construct
  source 1..25: mol_type = other DNA
  modified_base 1..25: mod_base = OTHER; note = 2'-O-(2-methoxyethyl) nucleotide phosphorothioate
  modified_base 9: mod_base = OTHER; note = A nucleoside-replacement group characterized by the lack of a nucleotide base
  modified_base 19: mod_base = OTHER; note = A nucleoside-replacement group characterized by the lack of a nucleotide base
  modified_base 3: mod_base = OTHER; note = 5-methyl cytosine
  modified_base 9: mod_base = OTHER; note = 5-methyl cytosine
  modified_base 12..14: mod_base = OTHER; note = 5-methyl cytosine
  modified_base 18: mod_base = OTHER; note = 5-methyl cytosine
  modified_base 20: mod_base = OTHER; note = 5-methyl cytosine
  modified_base 24: mod_base = OTHER; note = 5-methyl cytosine
gaagagacntacccagacncaaacg

SEQ ID NO: 5250 - DNA, 25 bp, synthetic construct
  source 1..25: mol_type = other DNA
  modified_base 1..25: mod_base = OTHER; note = 2'-O-(2-methoxyethyl) nucleotide phosphorothioate
  modified_base 8: mod_base = OTHER; note = A nucleoside-replacement group characterized by the lack of a nucleotide base
  modified_base 16: mod_base = OTHER; note = A nucleoside-replacement group characterized by the lack of a nucleotide base
  modified_base 8: mod_base = OTHER; note = 5-methyl cytosine
  modified_base 12..14: mod_base = OTHER; note = 5-methyl cytosine
  modified_base 18: mod_base = OTHER; note = 5-methyl cytosine
  modified_base 20: mod_base = OTHER; note = 5-methyl cytosine
  modified_base 24: mod_base = OTHER; note = 5-methyl cytosine
gaagagncatacccagacncaaacg

SEQ ID NO: 5251 - DNA, 23 bp, synthetic construct
  source 1..23: mol_type = other DNA
  modified_base 1..23: mod_base = OTHER; note = 2'-O-(2-methoxyethyl) nucleotide phosphorothioate
  modified_base 8: mod_base = OTHER; note = A nucleoside-replacement group characterized by the lack of a nucleotide base
  modified_base 16: mod_base = OTHER; note = A nucleoside-replacement group characterized by the lack of a nucleotide base
  modified_base 1: mod_base = OTHER; note = 5-methyl cytosine
  modified_base 4: mod_base = OTHER; note = 5-methyl cytosine
  modified_base 14: mod_base = OTHER; note = 5-methyl cytosine
  modified_base 18..20: mod_base = OTHER; note = 5-methyl cytosine
cagctggnagagacanacccaga

SEQ ID NO: 5252 - DNA, 23 bp, synthetic construct
  source 1..23: mol_type = other DNA
  modified_base 1..23: mod_base = OTHER; note = 2'-O-(2-methoxyethyl) nucleotide phosphorothioate
  modified_base 8: mod_base = OTHER; note = A nucleoside-replacement group characterized by the lack of a nucleotide base
  modified_base 16: mod_base = OTHER; note = A nucleoside-replacement group characterized by the lack of a nucleotide base
  modified_base 3: mod_base = OTHER; note = 5-methyl cytosine
  modified_base 13: mod_base = OTHER; note = 5-methyl cytosine
  modified_base 17..19: mod_base = OTHER; note = 5-methyl cytosine
  modified_base 23: mod_base = OTHER; note = 5-methyl cytosine
agctggangagacatncccagac

SEQ ID NO: 5253 - DNA, 23 bp, synthetic construct
  source 1..23: mol_type = other DNA
  modified_base 1..23: mod_base = OTHER; note = 2'-O-(2-methoxyethyl) nucleotide phosphorothioate
  modified_base 8: mod_base = OTHER; note = A nucleoside-replacement group characterized by the lack of a nucleotide base
  modified_base 16: mod_base = OTHER; note = A nucleoside-replacement group characterized by the lack of a nucleotide base
  modified_base 2: mod_base = OTHER; note = 5-methyl cytosine
  modified_base 5: mod_base = OTHER; note = 5-methyl cytosine
  modified_base 15: mod_base = OTHER; note = 5-methyl cytosine
  modified_base 19..21: mod_base = OTHER; note = 5-methyl cytosine
gcagctgnaagagacntacccag

SEQ ID NO: 5254 - DNA, 23 bp, synthetic construct
  source 1..23: mol_type = other DNA
  modified_base 1..23: mod_base = OTHER; note = 2'-O-(2-methoxyethyl) nucleotide phosphorothioate
  modified_base 8: mod_base = OTHER; note = A nucleoside-replacement group characterized by the lack of a nucleotide base
  modified_base 16: mod_base = OTHER; note = A nucleoside-replacement group characterized by the lack of a nucleotide base
  modified_base 4: mod_base = OTHER; note = 5-methyl cytosine
  modified_base 8: mod_base = OTHER; note = 5-methyl cytosine
  modified_base 17: mod_base = OTHER; note = 5-methyl cytosine
  modified_base 21..23: mod_base = OTHER; note = 5-methyl cytosine
ggcagctngaagaganataccca

SEQ ID NO: 5255 - DNA, 23 bp, synthetic construct
  source 1..23: mol_type = other DNA
  modified_base 1..23: mod_base = OTHER; note = 2'-O-(2-methoxyethyl) nucleotide phosphorothioate
  modified_base 8: mod_base = OTHER; note = A nucleoside-replacement group characterized by the lack of a nucleotide base
  modified_base 16: mod_base = OTHER; note = A nucleoside-replacement group characterized by the lack of a nucleotide base
  modified_base 4: mod_base = OTHER; note = 5-methyl cytosine
  modified_base 7: mod_base = OTHER; note = 5-methyl cytosine
  modified_base 17: mod_base = OTHER; note = 5-methyl cytosine
  modified_base 21..23: mod_base = OTHER; note = 5-methyl cytosine
aggcagcnggaagagncataccc

SEQ ID NO: 5256 - DNA, 25 bp, synthetic construct
  source 1..25: mol_type = other DNA
  modified_base 1..25: mod_base = OTHER; note = 2'-O-(2-methoxyethyl) nucleotide phosphorothioate
  modified_base 9: mod_base = OTHER; note = A nucleoside-replacement group characterized by the lack of a nucleotide base
  modified_base 19: mod_base = OTHER; note = A nucleoside-replacement group characterized by the lack of a nucleotide base
  modified_base 4: mod_base = OTHER; note = 5-methyl cytosine
  modified_base 17: mod_base = OTHER; note = 5-methyl cytosine
  modified_base 21..23: mod_base = OTHER; note = 5-methyl cytosine
aggcagctngaagagacanacccag

SEQ ID NO: 5257 - DNA, 25 bp, synthetic construct
  source 1..25: mol_type = other DNA
  modified_base 1..25: mod_base = OTHER; note = 2'-O-(2-methoxyethyl) nucleotide phosphorothioate
  modified_base 7: mod_base = OTHER; note = A nucleoside-replacement group characterized by the lack of a nucleotide base
  modified_base 19: mod_base = OTHER; note = A nucleoside-replacement group characterized by the lack of a nucleotide base
  modified_base 4: mod_base = OTHER; note = 5-methyl cytosine
  modified_base 17: mod_base = OTHER; note = 5-methyl cytosine
  modified_base 21..23: mod_base = OTHER; note = 5-methyl cytosine
aggcagntggaagagacanacccag

SEQ ID NO: 5258 - DNA, 23 bp, synthetic construct
  source 1..23: mol_type = other DNA
  modified_base 1..23: mod_base = OTHER; note = 2'-O-(2-methoxyethyl) nucleotide phosphorothioate
  modified_base 8: mod_base = OTHER; note = A nucleoside-replacement group characterized by the lack of a nucleotide base
  modified_base 16: mod_base = OTHER; note = A nucleoside-replacement group characterized by the lack of a nucleotide base
  modified_base 2: mod_base = OTHER; note = 5-methyl cytosine
  modified_base 5: mod_base = OTHER; note = 5-methyl cytosine
  modified_base 15: mod_base = OTHER; note = 5-methyl cytosine
  modified_base 19..21: mod_base = OTHER; note = 5-methyl cytosine
gcagctgnaagagacntacccag

SEQ ID NO: 5259 - DNA, 23 bp, synthetic construct
  source 1..23: mol_type = other DNA
  modified_base 1..23: mod_base = OTHER; note = 2'-O-(2-methoxyethyl) nucleotide phosphorothioate
  modified_base 8: mod_base = OTHER; note = A nucleoside-replacement group characterized by the lack of a nucleotide base
  modified_base 16: mod_base = OTHER; note = A nucleoside-replacement group characterized by the lack of a nucleotide base
  modified_base 2: mod_base = OTHER; note = 5-methyl cytosine
  modified_base 6..7: mod_base = OTHER; note = 5-methyl cytosine
  modified_base 14..15: mod_base = OTHER; note = 5-methyl cytosine
  modified_base 20: mod_base = OTHER; note = 5-methyl cytosine
  modified_base 23: mod_base = OTHER; note = 5-methyl cytosine
tctttccnggaaaccnaggcagc

SEQ ID NO: 5260 - DNA, 23 bp, synthetic construct
  source 1..23: mol_type = other DNA
  modified_base 1..23: mod_base = OTHER; note = 2'-O-(2-methoxyethyl) nucleotide phosphorothioate
  modified_base 8: mod_base = OTHER; note = A nucleoside-replacement group characterized by the lack of a nucleotide base
  modified_base 16: mod_base = OTHER; note = A nucleoside-replacement group characterized by the lack of a nucleotide base
  modified_base 4: mod_base = OTHER; note = 5-methyl cytosine
  modified_base 9: mod_base = OTHER; note = 5-methyl cytosine
  modified_base 17..18: mod_base = OTHER; note = 5-methyl cytosine
  modified_base 22: mod_base = OTHER; note = 5-methyl cytosine
gttctttncaggaaanccaggca

SEQ ID NO: 5261 - DNA, 23 bp, synthetic construct
  source 1..23: mol_type = other DNA
  modified_base 1..23: mod_base = OTHER; note = 2'-O-(2-methoxyethyl) nucleotide phosphorothioate
  modified_base 8: mod_base = OTHER; note = A nucleoside-replacement group characterized by the lack of a nucleotide base
  modified_base 16: mod_base = OTHER; note = A nucleoside-replacement group characterized by the lack of a nucleotide base
  modified_base 3: mod_base = OTHER; note = 5-methyl cytosine
  modified_base 7: mod_base = OTHER; note = 5-methyl cytosine
  modified_base 9: mod_base = OTHER; note = 5-methyl cytosine
  modified_base 15: mod_base = OTHER; note = 5-methyl cytosine
  modified_base 17: mod_base = OTHER; note = 5-methyl cytosine
  modified_base 21: mod_base = OTHER; note = 5-methyl cytosine
ttctttcnaggaaacncaggcag

SEQ ID NO: 5262 - DNA, 23 bp, synthetic construct
  source 1..23: mol_type = other DNA
  modified_base 1..23: mod_base = OTHER; note = 2'-O-(2-methoxyethyl) nucleotide phosphorothioate
  modified_base 8: mod_base = OTHER; note = A nucleoside-replacement group characterized by the lack of a nucleotide base
  modified_base 16: mod_base = OTHER; note = A nucleoside-replacement group characterized by the lack of a nucleotide base
  modified_base 2: mod_base = OTHER; note = 5-methyl cytosine
  modified_base 6..7: mod_base = OTHER; note = 5-methyl cytosine
  modified_base 14..15: mod_base = OTHER; note = 5-methyl cytosine
  modified_base 20: mod_base = OTHER; note = 5-methyl cytosine
  modified_base 23: mod_base = OTHER; note = 5-methyl cytosine
tctttccnggaaaccnaggcagc

SEQ ID NO: 5263 - DNA, 23 bp, synthetic construct
  source 1..23: mol_type = other DNA
  modified_base 1..23: mod_base = OTHER; note = 2'-O-(2-methoxyethyl) nucleotide phosphorothioate
  modified_base 8: mod_base = OTHER; note = A nucleoside-replacement group characterized by the lack of a nucleotide base
  modified_base 16: mod_base = OTHER; note = A nucleoside-replacement group characterized by the lack of a nucleotide base
  modified_base 4: mod_base = OTHER; note = 5-methyl cytosine
  modified_base 9: mod_base = OTHER; note = 5-methyl cytosine
  modified_base 17..18: mod_base = OTHER; note = 5-methyl cytosine
  modified_base 22: mod_base = OTHER; note = 5-methyl cytosine
gttctttncaggaaanccaggca

SEQ ID NO: 5264 - DNA, 23 bp, synthetic construct
  source 1..23: mol_type = other DNA
  modified_base 1..23: mod_base = OTHER; note = 2'-O-(2-methoxyethyl) nucleotide phosphorothioate
  modified_base 8: mod_base = OTHER; note = A nucleoside-replacement group characterized by the lack of a nucleotide base
  modified_base 16: mod_base = OTHER; note = A nucleoside-replacement group characterized by the lack of a nucleotide base
  modified_base 3: mod_base = OTHER; note = 5-methyl cytosine
  modified_base 7: mod_base = OTHER; note = 5-methyl cytosine
  modified_base 15: mod_base = OTHER; note = 5-methyl cytosine
  modified_base 17: mod_base = OTHER; note = 5-methyl cytosine
  modified_base 21: mod_base = OTHER; note = 5-methyl cytosine
ttctttcnaggaaacncaggcag

SEQ ID NO: 5265 - DNA, 25 bp, synthetic construct
  source 1..25: mol_type = other DNA
  modified_base 1..25: mod_base = OTHER; note = 2'-O-(2-methoxyethyl) nucleotide phosphorothioate
  modified_base 9: mod_base = OTHER; note = A nucleoside-replacement group characterized by the lack of a nucleotide base
  modified_base 19: mod_base = OTHER; note = A nucleoside-replacement group characterized by the lack of a nucleotide base
  modified_base 4: mod_base = OTHER; note = 5-methyl cytosine
  modified_base 16..18: mod_base = OTHER; note = 5-methyl cytosine
  modified_base 22: mod_base = OTHER; note = 5-methyl cytosine
  modified_base 25: mod_base = OTHER; note = 5-methyl cytosine
gttctttcnaggaaacccnggcagc

SEQ ID NO: 5266 - DNA, 25 bp, synthetic construct
  source 1..25: mol_type = other DNA
  modified_base 1..25: mod_base = OTHER; note = 2'-O-(2-methoxyethyl) nucleotide phosphorothioate
  modified_base 7: mod_base = OTHER; note = A nucleoside-replacement group characterized by the lack of a nucleotide base
  modified_base 19: mod_base = OTHER; note = A nucleoside-replacement group characterized by the lack of a nucleotide base
  modified_base 4: mod_base = OTHER; note = 5-methyl cytosine
  modified_base 8..9: mod_base = OTHER; note = 5-methyl cytosine
  modified_base 16..18: mod_base = OTHER; note = 5-methyl cytosine
  modified_base 22: mod_base = OTHER; note = 5-methyl cytosine
  modified_base 25: mod_base = OTHER; note = 5-methyl cytosine
gttcttnccaggaaacccnggcagc

SEQ ID NO: 5267 - DNA, 23 bp, synthetic construct
  source 1..23: mol_type = other DNA
  modified_base 1..23: mod_base = OTHER; note = 2'-O-(2-methoxyethyl) nucleotide phosphorothioate
  modified_base 8: mod_base = OTHER; note = A nucleoside-replacement group characterized by the lack of a nucleotide base
  modified_base 16: mod_base = OTHER; note = A nucleoside-replacement group characterized by the lack of a nucleotide base
  modified_base 6: mod_base = OTHER; note = 5-methyl cytosine
  modified_base 10..11: mod_base = OTHER; note = 5-methyl cytosine
  modified_base 18..20: mod_base = OTHER; note = 5-methyl cytosine
gagttctntccagganacccagg

SEQ ID NO: 5268 - DNA, 23 bp, synthetic construct
  source 1..23: mol_type = other DNA
  modified_base 1..23: mod_base = OTHER; note = 2'-O-(2-methoxyethyl) nucleotide phosphorothioate
  modified_base 8: mod_base = OTHER; note = A nucleoside-replacement group characterized by the lack of a nucleotide base
  modified_base 16: mod_base = OTHER; note = A nucleoside-replacement group characterized by the lack of a nucleotide base
  modified_base 5: mod_base = OTHER; note = 5-methyl cytosine
  modified_base 9..10: mod_base = OTHER; note = 5-methyl cytosine
  modified_base 17..19: mod_base = OTHER; note = 5-methyl cytosine
  modified_base 23: mod_base = OTHER; note = 5-methyl cytosine
agttcttnccaggaancccaggc

SEQ ID NO: 5269 - DNA, 23 bp, synthetic construct
  source 1..23: mol_type = other DNA
  modified_base 1..23: mod_base = OTHER; note = 2'-O-(2-methoxyethyl) nucleotide phosphorothioate
  modified_base 8: mod_base = OTHER; note = A nucleoside-replacement group characterized by the lack of a nucleotide base
  modified_base 16: mod_base = OTHER; note = A nucleoside-replacement group characterized by the lack of a nucleotide base
  modified_base 7: mod_base = OTHER; note = 5-methyl cytosine
  modified_base 11..12: mod_base = OTHER; note = 5-methyl cytosine
  modified_base 19..21: mod_base = OTHER; note = 5-methyl cytosine
agagttcnttccaggnaacccag

SEQ ID NO: 5270 - DNA, 25 bp, synthetic construct
  source 1..25: mol_type = other DNA
  modified_base 1..25: mod_base = OTHER; note = 2'-O-(2-methoxyethyl) nucleotide phosphorothioate
  modified_base 9: mod_base = OTHER; note = A nucleoside-replacement group characterized by the lack of a nucleotide base
  modified_base 19: mod_base = OTHER; note = A nucleoside-replacement group characterized by the lack of a nucleotide base
  modified_base 7: mod_base = OTHER; note = 5-methyl cytosine
  modified_base 11..12: mod_base = OTHER; note = 5-methyl cytosine
  modified_base 20..21: mod_base = OTHER; note = 5-methyl cytosine
  modified_base 25: mod_base = OTHER; note = 5-methyl cytosine
agagttctntccaggaaanccaggc

SEQ ID NO: 5271 - DNA, 25 bp, synthetic construct
  source 1..25: mol_type = other DNA
  modified_base 1..25: mod_base = OTHER; note = 2'-O-(2-methoxyethyl) nucleotide phosphorothioate
  modified_base 7: mod_base = OTHER; note = A nucleoside-replacement group characterized by the lack of a nucleotide base
  modified_base 19: mod_base = OTHER; note = A nucleoside-replacement group characterized by the lack of a nucleotide base
  modified_base 11..12: mod_base = OTHER; note = 5-methyl cytosine
  modified_base 20..21: mod_base = OTHER; note = 5-methyl cytosine
  modified_base 25: mod_base = OTHER; note = 5-methyl cytosine
agagttntttccaggaaanccaggc

SEQ ID NO: 5272 - DNA, 23 bp, synthetic construct
  source 1..23: mol_type = other DNA
  modified_base 1..23: mod_base = OTHER; note = 2'-O-(2-methoxyethyl) nucleotide phosphorothioate
  modified_base 8: mod_base = OTHER; note = A nucleoside-replacement group characterized by the lack of a nucleotide base
  modified_base 16: mod_base = OTHER; note = A nucleoside-replacement group characterized by the lack of a nucleotide base
  modified_base 1: mod_base = OTHER; note = 5-methyl cytosine
  modified_base 3: mod_base = OTHER; note = 5-methyl cytosine
  modified_base 6..7: mod_base = OTHER; note = 5-methyl cytosine
  modified_base 10..11: mod_base = OTHER; note = 5-methyl cytosine
  modified_base 14..15: mod_base = OTHER; note = 5-methyl cytosine
  modified_base 18..19: mod_base = OTHER; note = 5-methyl cytosine
  modified_base 23: mod_base = OTHER; note = 5-methyl cytosine
cacatccntccatccntccattc

SEQ ID NO: 5273 - DNA, 23 bp, synthetic construct
  source 1..23: mol_type = other DNA
  modified_base 1..23: mod_base = OTHER; note = 2'-O-(2-methoxyethyl) nucleotide phosphorothioate
  modified_base 8: mod_base = OTHER; note = A nucleoside-replacement group characterized by the lack of a nucleotide base
  modified_base 16: mod_base = OTHER; note = A nucleoside-replacement group characterized by the lack of a nucleotide base
  modified_base 2: mod_base = OTHER; note = 5-methyl cytosine
  modified_base 4: mod_base = OTHER; note = 5-methyl cytosine
  modified_base 7: mod_base = OTHER; note = 5-methyl cytosine
  modified_base 11..12: mod_base = OTHER; note = 5-methyl cytosine
  modified_base 15: mod_base = OTHER; note = 5-methyl cytosine
  modified_base 19..20: mod_base = OTHER; note = 5-methyl cytosine
acacatcnatccatcnatccatt

SEQ ID NO: 5274 - DNA, 23 bp, synthetic construct
  source 1..23: mol_type = other DNA
  modified_base 1..23: mod_base = OTHER; note = 2'-O-(2-methoxyethyl) nucleotide phosphorothioate
  modified_base 8: mod_base = OTHER; note = A nucleoside-replacement group characterized by the lack of a nucleotide base
  modified_base 16: mod_base = OTHER; note = A nucleoside-replacement group characterized by the lack of a nucleotide base
  modified_base 2: mod_base = OTHER; note = 5-methyl cytosine
  modified_base 5..6: mod_base = OTHER; note = 5-methyl cytosine
  modified_base 9..10: mod_base = OTHER; note = 5-methyl cytosine
  modified_base 13..14: mod_base = OTHER; note = 5-methyl cytosine
  modified_base 17..18: mod_base = OTHER; note = 5-methyl cytosine
  modified_base 22: mod_base = OTHER; note = 5-methyl cytosine
acatccanccatccanccattca

SEQ ID NO: 5275 - DNA, 23 bp, synthetic construct
  source 1..23: mol_type = other DNA
  modified_base 1..23: mod_base = OTHER; note = 2'-O-(2-methoxyethyl) nucleotide phosphorothioate
  modified_base 8: mod_base = OTHER; note = A nucleoside-replacement group characterized by the lack of a nucleotide base
  modified_base 16: mod_base = OTHER; note = A nucleoside-replacement group characterized by the lack of a nucleotide base
  modified_base 1: mod_base = OTHER; note = 5-methyl cytosine
  modified_base 3: mod_base = OTHER; note = 5-methyl cytosine
  modified_base 6..7: mod_base = OTHER; note = 5-methyl cytosine
  modified_base 10..11: mod_base = OTHER; note = 5-methyl cytosine
  modified_base 14..15: mod_base = OTHER; note = 5-methyl cytosine
  modified_base 18..19: mod_base = OTHER; note = 5-methyl cytosine
  modified_base 23: mod_base = OTHER; note = 5-methyl cytosine
cacatccntccatccntccattc

SEQ ID NO: 5276 - DNA, 23 bp, synthetic construct
  source 1..23: mol_type = other DNA
  modified_base 1..23: mod_base = OTHER; note = 2'-O-(2-methoxyethyl) nucleotide phosphorothioate
  modified_base 8: mod_base = OTHER; note = A nucleoside-replacement group characterized by the lack of a nucleotide base
  modified_base 16: mod_base = OTHER; note = A nucleoside-replacement group characterized by the lack of a nucleotide base
  modified_base 2: mod_base = OTHER; note = 5-methyl cytosine
  modified_base 4: mod_base = OTHER; note = 5-methyl cytosine
  modified_base 7: mod_base = OTHER; note = 5-methyl cytosine
  modified_base 11..12: mod_base = OTHER; note = 5-methyl cytosine
  modified_base 15: mod_base = OTHER; note = 5-methyl cytosine
  modified_base 19..20: mod_base = OTHER; note = 5-methyl cytosine
acacatcnatccatcnatccatt

SEQ ID NO: 5277 - DNA, 23 bp, synthetic construct
  source 1..23: mol_type = other DNA
  modified_base 1..23: mod_base = OTHER; note = 2'-O-(2-methoxyethyl) nucleotide phosphorothioate
  modified_base 8: mod_base = OTHER; note = A nucleoside-replacement group characterized by the lack of a nucleotide base
  modified_base 16: mod_base = OTHER; note = A nucleoside-replacement group characterized by the lack of a nucleotide base
  modified_base 2: mod_base = OTHER; note = 5-methyl cytosine
  modified_base 5..6: mod_base = OTHER; note = 5-methyl cytosine
  modified_base 9..10: mod_base = OTHER; note = 5-methyl cytosine
  modified_base 13..14: mod_base = OTHER; note = 5-methyl cytosine
  modified_base 17..18: mod_base = OTHER; note = 5-methyl cytosine
  modified_base 22: mod_base = OTHER; note = 5-methyl cytosine
acatccanccatccanccattca

SEQ ID NO: 5278 - DNA, 25 bp, synthetic construct
  source 1..25: mol_type = other DNA
  modified_base 1..25: mod_base = OTHER; note = 2'-O-(2-methoxyethyl) nucleotide phosphorothioate
  modified_base 8: mod_base = OTHER; note = A nucleoside-replacement group characterized by the lack of a nucleotide base
  modified_base 9: mod_base = OTHER; note = Locked nucleic acid without modified sugar moiety
  modified_base 18: mod_base = OTHER; note = A nucleoside-replacement group characterized by the lack of a nucleotide base
  modified_base 19: mod_base = OTHER; note = Locked nucleic acid without modified sugar moiety
  modified_base 2: mod_base = OTHER; note = 5-methyl cytosine
  modified_base 5: mod_base = OTHER; note = 5-methyl cytosine
  modified_base 15: mod_base = OTHER; note = 5-methyl cytosine
  modified_base 20..21: mod_base = OTHER; note = 5-methyl cytosine
  modified_base 25: mod_base = OTHER; note = 5-methyl cytosine
gcagctngaagagacatanccagac

SEQ ID NO: 5279 - DNA, 25 bp, synthetic construct
  source 1..25: mol_type = other DNA
  modified_base 1..25: mod_base = OTHER; note = 2'-O-(2-methoxyethyl) nucleotide phosphorothioate
  modified_base 6: mod_base = OTHER; note = Locked nucleic acid without modified sugar moiety
  modified_base 7: mod_base = OTHER; note = A nucleoside-replacement group characterized by the lack of a nucleotide base
  modified_base 19: mod_base = OTHER; note = A nucleoside-replacement group characterized by the lack of a nucleotide base
  modified_base 20: mod_base = OTHER; note = Locked nucleic acid without modified sugar moiety
  modified_base 3: mod_base = OTHER; note = 5-methyl cytosine
  modified_base 7: mod_base = OTHER; note = 5-methyl cytosine
  modified_base 9: mod_base = OTHER; note = 5-methyl cytosine
  modified_base 13: mod_base = OTHER; note = 5-methyl cytosine
  modified_base 15: mod_base = OTHER; note = 5-methyl cytosine
  modified_base 19: mod_base = OTHER; note = 5-methyl cytosine
  modified_base 22..23: mod_base = OTHER; note = 5-methyl cytosine
gcagctngaagagacatanccagac

SEQ ID NO: 5280 - DNA, 25 bp, synthetic construct
  source 1..25: mol_type = other DNA
  modified_base 1..25: mod_base = OTHER; note = 2'-O-(2-methoxyethyl) nucleotide phosphorothioate
  modified_base 6: mod_base = OTHER; note = Locked nucleic acid without modified sugar moiety
  modified_base 7: mod_base = OTHER; note = A nucleoside-replacement group characterized by the lack of a nucleotide base
  modified_base 18: mod_base = OTHER; note = Locked nucleic acid without modified sugar moiety
  modified_base 19: mod_base = OTHER; note = A nucleoside-replacement group characterized by the lack of a nucleotide base
  modified_base 2: mod_base = OTHER; note = 5-methyl cytosine
  modified_base 5: mod_base = OTHER; note = 5-methyl cytosine
  modified_base 15: mod_base = OTHER; note = 5-methyl cytosine
  modified_base 20..21: mod_base = OTHER; note = 5-methyl cytosine
  modified_base 25: mod_base = OTHER; note = 5-methyl cytosine
gcagctngaagagacatanccagac

SEQ ID NO: 5281 - DNA, 25 bp, synthetic construct
  source 1..25: mol_type = other DNA
  modified_base 1..25: mod_base = OTHER; note = 2'-O-(2-methoxyethyl) nucleotide phosphorothioate
  modified_base 4: mod_base = OTHER; note = Locked nucleic acid without modified sugar moiety
  modified_base 7: mod_base = OTHER; note = A nucleoside-replacement group characterized by the lack of a nucleotide base
  modified_base 13: mod_base = OTHER; note = Locked nucleic acid without modified sugar moiety
  modified_base 19: mod_base = OTHER; note = A nucleoside-replacement group characterized by the lack of a nucleotide base
  modified_base 22: mod_base = OTHER; note = Locked nucleic acid without modified sugar moiety
  modified_base 2: mod_base = OTHER; note = 5-methyl cytosine
  modified_base 5: mod_base = OTHER; note = 5-methyl cytosine
  modified_base 15: mod_base = OTHER; note = 5-methyl cytosine
  modified_base 20..21: mod_base = OTHER; note = 5-methyl cytosine
  modified_base 25: mod_base = OTHER; note = 5-methyl cytosine
gcagctngaagagacatanccagac

SEQ ID NO: 5282 - DNA, 25 bp, synthetic construct
  source 1..25: mol_type = other DNA
  modified_base 1..25: mod_base = OTHER; note = 2'-O-(2-methoxyethyl) nucleotide phosphorothioate
  modified_base 4: mod_base = OTHER; note = Locked nucleic acid without modified sugar moiety
  modified_base 7: mod_base = OTHER; note = A nucleoside-replacement group characterized by the lack of a nucleotide base
  modified_base 19: mod_base = OTHER; note = A nucleoside-replacement group characterized by the lack of a nucleotide base
  modified_base 22: mod_base = OTHER; note = Locked nucleic acid without modified sugar moiety
  modified_base 2: mod_base = OTHER; note = 5-methyl cytosine
  modified_base 5: mod_base = OTHER; note = 5-methyl cytosine
  modified_base 15: mod_base = OTHER; note = 5-methyl cytosine
  modified_base 20..21: mod_base = OTHER; note = 5-methyl cytosine
  modified_base 25: mod_base = OTHER; note = 5-methyl cytosine
gcagctngaagagacatanccagac

SEQ ID NO: 5283 - DNA, 25 bp, synthetic construct
  source 1..25: mol_type = other DNA
  modified_base 1..25: mod_base = OTHER; note = 2'-O-(2-methoxyethyl) nucleotide phosphorothioate
  modified_base 9: mod_base = OTHER; note = A nucleoside-replacement group characterized by the lack of a nucleotide base
  modified_base 10: mod_base = OTHER; note = Locked nucleic acid without modified sugar moiety
  modified_base 19: mod_base = OTHER; note = A nucleoside-replacement group characterized by the lack of a nucleotide base
  modified_base 20: mod_base = OTHER; note = Locked nucleic acid without modified sugar moiety
  modified_base 2: mod_base = OTHER; note = 5-methyl cytosine
  modified_base 5: mod_base = OTHER; note = 5-methyl cytosine
  modified_base 15: mod_base = OTHER; note = 5-methyl cytosine
  modified_base 20..21: mod_base = OTHER; note = 5-methyl cytosine
  modified_base 25: mod_base = OTHER; note = 5-methyl cytosine
gcagctggnagagacatanccagac

SEQ ID NO: 5284 - DNA, 25 bp, synthetic construct
  source 1..25: mol_type = other DNA
  modified_base 1..25: mod_base = OTHER; note = 2'-O-(2-methoxyethyl) nucleotide phosphorothioate
  modified_base 8: mod_base = OTHER; note = Locked nucleic acid without modified sugar moiety
  modified_base 9: mod_base = OTHER; note = A nucleoside-replacement group characterized by the lack of a nucleotide base
  modified_base 19: mod_base = OTHER; note = A nucleoside-replacement group characterized by the lack of a nucleotide base
  modified_base 20: mod_base = OTHER; note = Locked nucleic acid without modified sugar moiety
  modified_base 2: mod_base = OTHER; note = 5-methyl cytosine
  modified_base 5: mod_base = OTHER; note = 5-methyl cytosine
  modified_base 15: mod_base = OTHER; note = 5-methyl cytosine
  modified_base 20..21: mod_base = OTHER; note = 5-methyl cytosine
  modified_base 25: mod_base = OTHER; note = 5-methyl cytosine
gcagctggnagagacatanccagac

SEQ ID NO: 5285 - DNA, 25 bp, synthetic construct
  source 1..25: mol_type = other DNA
  modified_base 1..25: mod_base = OTHER; note = 2'-O-(2-methoxyethyl) nucleotide phosphorothioate
  modified_base 8: mod_base = OTHER; note = Locked nucleic acid without modified sugar moiety
  modified_base 9: mod_base = OTHER; note = A nucleoside-replacement group characterized by the lack of a nucleotide base
  modified_base 18: mod_base = OTHER; note = Locked nucleic acid without modified sugar moiety
  modified_base 19: mod_base = OTHER; note = A nucleoside-replacement group characterized by the lack of a nucleotide base
  modified_base 2: mod_base = OTHER; note = 5-methyl cytosine
  modified_base 5: mod_base = OTHER; note = 5-methyl cytosine
  modified_base 15: mod_base = OTHER; note = 5-methyl cytosine
  modified_base 20..21: mod_base = OTHER; note = 5-methyl cytosine
  modified_base 25: mod_base = OTHER; note = 5-methyl cytosine
gcagctggnagagacatanccagac

SEQ ID NO: 5286 - DNA, 25 bp, synthetic construct
  source 1..25: mol_type = other DNA
  modified_base 1..25: mod_base = OTHER; note = 2'-O-(2-methoxyethyl) nucleotide phosphorothioate
  modified_base 4: mod_base = OTHER; note = Locked nucleic acid without modified sugar moiety
  modified_base 9: mod_base = OTHER; note = A nucleoside-replacement group characterized by the lack of a nucleotide base
  modified_base 13: mod_base = OTHER; note = Locked nucleic acid without modified sugar moiety
  modified_base 19: mod_base = OTHER; note = A nucleoside-replacement group characterized by the lack of a nucleotide base
  modified_base 22: mod_base = OTHER; note = Locked nucleic acid without modified sugar moiety
  modified_base 2: mod_base = OTHER; note = 5-methyl cytosine
  modified_base 5: mod_base = OTHER; note = 5-methyl cytosine
  modified_base 15: mod_base = OTHER; note = 5-methyl cytosine
  modified_base 20..21: mod_base = OTHER; note = 5-methyl cytosine
  modified_base 25: mod_base = OTHER; note = 5-methyl cytosine
gcagctggnagagacatanccagac

SEQ ID NO: 5287 - DNA, 25 bp, synthetic construct
  source 1..25: mol_type = other DNA
  modified_base 1..25: mod_base = OTHER; note = 2'-O-(2-methoxyethyl) nucleotide phosphorothioate
  modified_base 4: mod_base = OTHER; note = Locked nucleic acid without modified sugar moiety
  modified_base 9: mod_base = OTHER; note = A nucleoside-replacement group characterized by the lack of a nucleotide base
  modified_base 19: mod_base = OTHER; note = A nucleoside-replacement group characterized by the lack of a nucleotide base
  modified_base 22: mod_base = OTHER; note = Locked nucleic acid without modified sugar moiety
  modified_base 2: mod_base = OTHER; note = 5-methyl cytosine
  modified_base 5: mod_base = OTHER; note = 5-methyl cytosine
  modified_base 15: mod_base = OTHER; note = 5-methyl cytosine
  modified_base 20..21: mod_base = OTHER; note = 5-methyl cytosine
  modified_base 25: mod_base = OTHER; note = 5-methyl cytosine
gcagctggnagagacatanccagac

SEQ ID NO: 5288 - DNA, 23 bp, synthetic construct
  source 1..23: mol_type = other DNA
  modified_base 1..23: mod_base = OTHER; note = 2'-O-(2-methoxyethyl) nucleotide phosphorothioate
  modified_base 8: mod_base = OTHER; note = A nucleoside-replacement group characterized by the lack of a nucleotide base
  modified_base 9: mod_base = OTHER; note = Locked nucleic acid without modified sugar moiety
  modified_base 16: mod_base = OTHER; note = A nucleoside-replacement group characterized by the lack of a nucleotide base
  modified_base 17: mod_base = OTHER; note = Locked nucleic acid without modified sugar moiety
  modified_base 4: mod_base = OTHER; note = 5-methyl cytosine
  modified_base 9: mod_base = OTHER; note = 5-methyl cytosine
  modified_base 17..18: mod_base = OTHER; note = 5-methyl cytosine
  modified_base 22: mod_base = OTHER; note = 5-methyl cytosine
gttctttncaggaaanccaggca

SEQ ID NO: 5289 - DNA, 23 bp, synthetic construct
  source 1..23: mol_type = other DNA
  modified_base 1..23: mod_base = OTHER; note = 2'-O-(2-methoxyethyl) nucleotide phosphorothioate
  modified_base 7: mod_base = OTHER; note = Locked nucleic acid without modified sugar moiety
  modified_base 8: mod_base = OTHER; note = A nucleoside-replacement group characterized by the lack of a nucleotide base
  modified_base 17: mod_base = OTHER; note = Locked nucleic acid without modified sugar moiety
  modified_base 18: mod_base = OTHER; note = A nucleoside-replacement group characterized by the lack of a nucleotide base
  modified_base 4: mod_base = OTHER; note = 5-methyl cytosine
  modified_base 9: mod_base = OTHER; note = 5-methyl cytosine
  modified_base 17..18: mod_base = OTHER; note = 5-methyl cytosine
  modified_base 22: mod_base = OTHER; note = 5-methyl cytosine
gttctttncaggaaaancaggca

SEQ ID NO: 5290 - DNA, 23 bp, synthetic construct
  source 1..23: mol_type = other DNA
  modified_base 1..23: mod_base = OTHER; note = 2'-O-(2-methoxyethyl) nucleotide phosphorothioate
  modified_base 7: mod_base = OTHER; note = Locked nucleic acid without modified sugar moiety
  modified_base 8: mod_base = OTHER; note = A nucleoside-replacement group characterized by the lack of a nucleotide base
  modified_base 15: mod_base = OTHER; note = Locked nucleic acid without modified sugar moiety
  modified_base 16: mod_base = OTHER; note = A nucleoside-replacement group characterized by the lack of a nucleotide base
  modified_base 4: mod_base = OTHER; note = 5-methyl cytosine
  modified_base 9: mod_base = OTHER; note = 5-methyl cytosine
  modified_base 17..18: mod_base = OTHER; note = 5-methyl cytosine
  modified_base 22: mod_base = OTHER; note = 5-methyl cytosine
gttctttncaggaaanccaggca

SEQ ID NO: 5291 - DNA, 23 bp, synthetic construct
  source 1..23: mol_type = other DNA
  modified_base 1..23: mod_base = OTHER; note = 2'-O-(2-methoxyethyl) nucleotide phosphorothioate
  modified_base 4: mod_base = OTHER; note = Locked nucleic acid without modified sugar moiety
  modified_base 8: mod_base = OTHER; note = A nucleoside-replacement group characterized by the lack of a nucleotide base
  modified_base 12: mod_base = OTHER; note = Locked nucleic acid without modified sugar moiety
  modified_base 16: mod_base = OTHER; note = A nucleoside-replacement group characterized by the lack of a nucleotide base
  modified_base 20: mod_base = OTHER; note = Locked nucleic acid without modified sugar moiety
  modified_base 4: mod_base = OTHER; note = 5-methyl cytosine
  modified_base 9: mod_base = OTHER; note = 5-methyl cytosine
  modified_base 17..18: mod_base = OTHER; note = 5-methyl cytosine
  modified_base 22: mod_base = OTHER; note = 5-methyl cytosine
gttctttncaggaaanccaggca

SEQ ID NO: 5292 - DNA, 23 bp, synthetic construct
  source 1..23: mol_type = other DNA
  modified_base 1..23: mod_base = OTHER; note = 2'-O-(2-methoxyethyl) nucleotide phosphorothioate
  modified_base 4: mod_base = OTHER; note = Locked nucleic acid without modified sugar moiety
  modified_base 8: mod_base = OTHER; note = A nucleoside-replacement group characterized by the lack of a nucleotide base
  modified_base 16: mod_base = OTHER; note = A nucleoside-replacement group characterized by the lack of a nucleotide base
  modified_base 20: mod_base = OTHER; note = Locked nucleic acid without modified sugar moiety
  modified_base 4: mod_base = OTHER; note = 5-methyl cytosine
  modified_base 9: mod_base = OTHER; note = 5-methyl cytosine
  modified_base 17..18: mod_base = OTHER; note = 5-methyl cytosine
  modified_base 22: mod_base = OTHER; note = 5-methyl cytosine
gttctttncaggaaanccaggca

SEQ ID NO: 5293 - DNA, 25 bp, synthetic construct
  source 1..25: mol_type = other DNA
  modified_base 1..25: mod_base = OTHER; note = 2'-O-(2-methoxyethyl) nucleotide phosphorothioate
  modified_base 7: mod_base = OTHER; note = 5-methyl cytosine
  modified_base 12: mod_base = OTHER; note = 5-methyl cytosine
  modified_base 16: mod_base = OTHER; note = 5-methyl cytosine
gaagagctgggcaggcaggaatggt

SEQ ID NO: 5294 - DNA, 25 bp, synthetic construct
  source 1..25: mol_type = other DNA
  modified_base 1..25: mod_base = OTHER; note = 2'-O-(2-methoxyethyl) nucleotide phosphorothioate
  modified_base 15: mod_base = OTHER; note = 5-methyl cytosine
  modified_base 16: mod_base = OTHER; note = 5-methyl cytosine
tgtggatggtgtggccagaaagagg

SEQ ID NO: 5295 - DNA, 25 bp, synthetic construct
  source 1..25: mol_type = other DNA
  modified_base 1..25: mod_base = OTHER; note = 2'-O-(2-methoxyethyl) nucleotide phosphorothioate
  modified_base 3..4: mod_base = OTHER; note = 5-methyl cytosine
ggccaggagagtgtggatggtgtgg

SEQ ID NO: 5296 - DNA, 25 bp, synthetic construct
  source 1..25: mol_type = other DNA
  modified_base 1..25: mod_base = OTHER; note = 2'-O-(2-methoxyethyl) nucleotide phosphorothioate
  modified_base 5: mod_base = OTHER; note = 5-methyl cytosine
  modified_base 10: mod_base = OTHER; note = 5-methyl cytosine
  modified_base 15: mod_base = OTHER; note = 5-methyl cytosine
  modified_base 18: mod_base = OTHER; note = 5-methyl cytosine
  modified_base 20: mod_base = OTHER; note = 5-methyl cytosine
atggcatggcgggcagtctcagagg

SEQ ID NO: 5297 - DNA, 25 bp, synthetic construct
  source 1..25: mol_type = other DNA
  modified_base 1..25: mod_base = OTHER; note = 2'-O-(2-methoxyethyl) nucleotide phosphorothioate
  modified_base 12: mod_base = OTHER; note = 5-methyl cytosine
  modified_base 17: mod_base = OTHER; note = 5-methyl cytosine
  modified_base 21: mod_base = OTHER; note = 5-methyl cytosine
  modified_base 25: mod_base = OTHER; note = 5-methyl cytosine
aaagggaatggcatggcgggcagtc

SEQ ID NO: 5298 - DNA, 25 bp, synthetic construct
  source 1..25: mol_type = other DNA
  modified_base 1..25: mod_base = OTHER; note = 2'-O-(2-methoxyethyl) nucleotide phosphorothioate
  modified_base 16: mod_base = OTHER; note = 5-methyl cytosine
  modified_base 21: mod_base = OTHER; note = 5-methyl cytosine
aggtaaagggaatggcatggcgggc

SEQ ID NO: 5299 - DNA, 23 bp, synthetic construct
  source 1..23: mol_type = other DNA
  modified_base 1..23: mod_base = OTHER; note = 2'-O-(2-methoxyethyl) nucleotide phosphorothioate
  modified_base 15: mod_base = OTHER; note = 5-methyl cytosine
  modified_base 20: mod_base = OTHER; note = 5-methyl cytosine
ggtaaagggaatggcatggcggg

SEQ ID NO: 5300 - DNA, 23 bp, synthetic construct
  source 1..23: mol_type = other DNA
  modified_base 1..23: mod_base = OTHER; note = 2'-O-(2-methoxyethyl) nucleotide phosphorothioate
  modified_base 15: mod_base = OTHER; note = 5-methyl cytosine
  modified_base 20: mod_base = OTHER; note = 5-methyl cytosine
  modified_base 8: mod_base = OTHER; note = A nucleoside-replacement group characterized by the lack of a nucleotide base
  modified_base 16: mod_base = OTHER; note = A nucleoside-replacement group characterized by the lack of a nucleotide base
ggtaaagngaatggcntggcggg

SEQ ID NO: 5301 - DNA, 23 bp, synthetic construct
  source 1..23: mol_type = other DNA
  modified_base 1..23: mod_base = OTHER; note = 2'-O-(2-methoxyethyl) nucleotide phosphorothioate
  modified_base 16: mod_base = OTHER; note = 5-methyl cytosine
  modified_base 21: mod_base = OTHER; note = 5-methyl cytosine
aggtaaagggaatggcatggcgg

SEQ ID NO: 5302 - DNA, 23 bp, synthetic construct
  source 1..23: mol_type = other DNA
  modified_base 1..23: mod_base = OTHER; note = 2'-O-(2-methoxyethyl) nucleotide phosphorothioate
  modified_base 21: mod_base = OTHER; note = 5-methyl cytosine
  modified_base 8: mod_base = OTHER; note = A nucleoside-replacement group characterized by the lack of a nucleotide base
  modified_base 16: mod_base = OTHER; note = A nucleoside-replacement group characterized by the lack of a nucleotide base
aggtaaanggaatggnatggcgg

SEQ ID NO: 5303 - DNA, 23 bp, synthetic construct
  source 1..23: mol_type = other DNA
  modified_base 1..23: mod_base = OTHER; note = 2'-O-(2-methoxyethyl) nucleotide phosphorothioate
  modified_base 14: mod_base = OTHER; note = 5-methyl cytosine
  modified_base 19: mod_base = OTHER; note = 5-methyl cytosine
  modified_base 23: mod_base = OTHER; note = 5-methyl cytosine
gtaaagggaatggcatggcgggc

SEQ ID NO: 5304 - DNA, 23 bp, synthetic construct
  source 1..23: mol_type = other DNA
  modified_base 1..23: mod_base = OTHER; note = 2'-O-(2-methoxyethyl) nucleotide phosphorothioate
  modified_base 14: mod_base = OTHER; note = 5-methyl cytosine
  modified_base 19: mod_base = OTHER; note = 5-methyl cytosine
  modified_base 23: mod_base = OTHER; note = 5-methyl cytosine
  modified_base 8: mod_base = OTHER; note = A nucleoside-replacement group characterized by the lack of a nucleotide base
  modified_base 16: mod_base = OTHER; note = A nucleoside-replacement group characterized by the lack of a nucleotide base
gtaaaggnaatggcanggcgggc

SEQ ID NO: 5305 - DNA, 25 bp, synthetic construct
  source 1..25: mol_type = other DNA
  modified_base 1..25: mod_base = OTHER; note = 2'-O-(2-methoxyethyl) nucleotide phosphorothioate
  modified_base 2..3: mod_base = OTHER; note = 5-methyl cytosine
  modified_base 19: mod_base = OTHER; note = 5-methyl cytosine
  modified_base 24: mod_base = OTHER; note = 5-methyl cytosine
tccaggtaaagggaatggcatggcg

SEQ ID NO: 5306 - DNA, 25 bp, synthetic construct
  source 1..25: mol_type = other DNA
  modified_base 1..25: mod_base = OTHER; note = 2'-O-(2-methoxyethyl) nucleotide phosphorothioate
  modified_base 14..15: mod_base = OTHER; note = 5-methyl cytosine
agggaggagttttccaggtaaaggg

SEQ ID NO: 5307 - DNA, 25 bp, synthetic construct
  source 1..25: mol_type = other DNA
  modified_base 1..25: mod_base = OTHER; note = 2'-O-(2-methoxyethyl) nucleotide phosphorothioate
  modified_base 14..15: mod_base = OTHER; note = 5-methyl cytosine
  modified_base 7: mod_base = OTHER; note = A nucleoside-replacement group characterized by the lack of a nucleotide base
  modified_base 19: mod_base = OTHER; note = A nucleoside-replacement group characterized by the lack of a nucleotide base
agggagnagttttccaggnaaaggg

SEQ ID NO: 5308 - DNA, 25 bp, synthetic construct
  source 1..25: mol_type = other DNA
  modified_base 1..25: mod_base = OTHER; note = 2'-O-(2-methoxyethyl) nucleotide phosphorothioate
  modified_base 14..15: mod_base = OTHER; note = 5-methyl cytosine
  modified_base 9: mod_base = OTHER; note = A nucleoside-replacement group characterized by the lack of a nucleotide base
  modified_base 19: mod_base = OTHER; note = A nucleoside-replacement group characterized by the lack of a nucleotide base
agggagganttttccaggnaaaggg

SEQ ID NO: 5309 - DNA, 25 bp, synthetic construct
  source 1..25: mol_type = other DNA
  modified_base 1..25: mod_base = OTHER; note = 2'-O-(2-methoxyethyl) nucleotide phosphorothioate
  modified_base 12..14: mod_base = OTHER; note = 5-methyl cytosine
  modified_base 20: mod_base = OTHER; note = 5-methyl cytosine
  modified_base 25: mod_base = OTHER; note = 5-methyl cytosine
agaggaggtgaccctgaatctggac

SEQ ID NO: 5310 - DNA, 23 bp, synthetic construct
  source 1..23: mol_type = other DNA
  modified_base 1..23: mod_base = OTHER; note = 2'-O-(2-methoxyethyl) nucleotide phosphorothioate
  modified_base 11..13: mod_base = OTHER; note = 5-methyl cytosine
  modified_base 19: mod_base = OTHER; note = 5-methyl cytosine
gaggaggtgaccctgaatctgga

SEQ ID NO: 5311 - DNA, 23 bp, synthetic construct
  source 1..23: mol_type = other DNA
  modified_base 1..23: mod_base = OTHER; note = 2'-O-(2-methoxyethyl) nucleotide phosphorothioate
  modified_base 11..13: mod_base = OTHER; note = 5-methyl cytosine
  modified_base 19: mod_base = OTHER; note = 5-methyl cytosine
  modified_base 8: mod_base = OTHER; note = A nucleoside-replacement group characterized by the lack of a nucleotide base
  modified_base 16: mod_base = OTHER; note = A nucleoside-replacement group characterized by the lack of a nucleotide base
gaggaggngaccctgnatctgga

SEQ ID NO: 5312 - DNA, 23 bp, synthetic construct
  source 1..23: mol_type = other DNA
  modified_base 1..23: mod_base = OTHER; note = 2'-O-(2-methoxyethyl) nucleotide phosphorothioate
  modified_base 12..14: mod_base = OTHER; note = 5-methyl cytosine
  modified_base 20: mod_base = OTHER; note = 5-methyl cytosine
agaggaggtgaccctgaatctgg

SEQ ID NO: 5313 - DNA, 23 bp, synthetic construct
  source 1..23: mol_type = other DNA
  modified_base 1..23: mod_base = OTHER; note = 2'-O-(2-methoxyethyl) nucleotide phosphorothioate
  modified_base 12..14: mod_base = OTHER; note = 5-methyl cytosine
  modified_base 20: mod_base = OTHER; note = 5-methyl cytosine
  modified_base 8: mod_base = OTHER; note = A nucleoside-replacement group characterized by the lack of a nucleotide base
  modified_base 16: mod_base = OTHER; note = A nucleoside-replacement group characterized by the lack of a nucleotide base
agaggagntgaccctnaatctgg

SEQ ID NO: 5314 - DNA, 23 bp, synthetic construct
  source 1..23: mol_type = other DNA
  modified_base 1..23: mod_base = OTHER; note = 2'-O-(2-methoxyethyl) nucleotide phosphorothioate
  modified_base 10..12: mod_base = OTHER; note = 5-methyl cytosine
  modified_base 18: mod_base = OTHER; note = 5-methyl cytosine
  modified_base 23: mod_base = OTHER; note = 5-methyl cytosine
aggaggtgaccctgaatctggac

SEQ ID NO: 5315 - DNA, 23 bp, synthetic construct
  source 1..23: mol_type = other DNA
  modified_base 1..23: mod_base = OTHER; note = 2'-O-(2-methoxyethyl) nucleotide phosphorothioate
  modified_base 10..12: mod_base = OTHER; note = 5-methyl cytosine
  modified_base 18: mod_base = OTHER; note = 5-methyl cytosine
  modified_base 23: mod_base = OTHER; note = 5-methyl cytosine
  modified_base 8: mod_base = OTHER; note = A nucleoside-replacement group characterized by the lack of a nucleotide base
  modified_base 16: mod_base = OTHER; note = A nucleoside-replacement group characterized by the lack of a nucleotide base
aggaggtnaccctgantctggac

SEQ ID NO: 5316 - DNA, 25 bp, synthetic construct
  source 1..25: mol_type = other DNA
  modified_base 1..25: mod_base = OTHER; note = 2'-O-(2-methoxyethyl) nucleotide phosphorothioate
  modified_base 7: mod_base = OTHER; note = 5-methyl cytosine
  modified_base 10..11: mod_base = OTHER; note = 5-methyl cytosine
  modified_base 18..19: mod_base = OTHER; note = 5-methyl cytosine
gagagtcaacctggaggccaaggtg

SEQ ID NO: 5317 - DNA, 25 bp, synthetic construct
  source 1..25: mol_type = other DNA
  modified_base 1..25: mod_base = OTHER; note = 2'-O-(2-methoxyethyl) nucleotide phosphorothioate
  modified_base 12: mod_base = OTHER; note = 5-methyl cytosine
  modified_base 15..16: mod_base = OTHER; note = 5-methyl cytosine
  modified_base 23..24: mod_base = OTHER; note = 5-methyl cytosine
gtagtgagagtcaacctggaggcca

SEQ ID NO: 5318 - DNA, 25 bp, synthetic construct
  source 1..25: mol_type = other DNA
  modified_base 1..25: mod_base = OTHER; note = 2'-O-(2-methoxyethyl) nucleotide phosphorothioate
  modified_base 15: mod_base = OTHER; note = 5-methyl cytosine
  modified_base 18..19: mod_base = OTHER; note = 5-methyl cytosine
tgagtagtgagagtcaacctggagg

SEQ ID NO: 5319 - DNA, 25 bp, synthetic construct
  source 1..25: mol_type = other DNA
  modified_base 1..25: mod_base = OTHER; note = 2'-O-(2-methoxyethyl) nucleotide phosphorothioate
  modified_base 1..2: mod_base = OTHER; note = 5-methyl cytosine
  modified_base 16: mod_base = OTHER; note = 5-methyl cytosine
cctgagtggttagggctggaataga

SEQ ID NO: 5320 - DNA, 25 bp, synthetic construct
  source 1..25: mol_type = other DNA
  modified_base 1..25: mod_base = OTHER; note = 2'-O-(2-methoxyethyl) nucleotide phosphorothioate
  modified_base 1: mod_base = OTHER; note = 5-methyl cytosine
  modified_base 5..6: mod_base = OTHER; note = 5-methyl cytosine
  modified_base 20: mod_base = OTHER; note = 5-methyl cytosine
caatcctgagtggttagggctggaa

SEQ ID NO: 5321 - DNA, 25 bp, synthetic construct
  source 1..25: mol_type = other DNA
  modified_base 1..25: mod_base = OTHER; note = 2'-O-(2-methoxyethyl) nucleotide phosphorothioate
  modified_base 2: mod_base = OTHER; note = 5-methyl cytosine
  modified_base 5..7: mod_base = OTHER; note = 5-methyl cytosine
  modified_base 11..12: mod_base = OTHER; note = 5-methyl cytosine
acggcccaatcctgagtggttaggg

SEQ ID NO: 5322 - DNA, 25 bp, synthetic construct
  source 1..25: mol_type = other DNA
  modified_base 1..25: mod_base = OTHER; note = 2'-O-(2-methoxyethyl) nucleotide phosphorothioate
  modified_base 2: mod_base = OTHER; note = 5-methyl cytosine
  modified_base 4: mod_base = OTHER; note = 5-methyl cytosine
  modified_base 8: mod_base = OTHER; note = 5-methyl cytosine
  modified_base 11..13: mod_base = OTHER; note = 5-methyl cytosine
  modified_base 17..18: mod_base = OTHER; note = 5-methyl cytosine
acacaaacggcccaatcctgagtgg

SEQ ID NO: 5323 - DNA, 23 bp, synthetic construct
  source 1..23: mol_type = other DNA
  modified_base 1..23: mod_base = OTHER; note = 2'-O-(2-methoxyethyl) nucleotide phosphorothioate
  modified_base 1: mod_base = OTHER; note = 5-methyl cytosine
  modified_base 3: mod_base = OTHER; note = 5-methyl cytosine
  modified_base 7: mod_base = OTHER; note = 5-methyl cytosine
  modified_base 10..12: mod_base = OTHER; note = 5-methyl cytosine
  modified_base 16..17: mod_base = OTHER; note = 5-methyl cytosine
cacaaacggcccaatcctgagtg

SEQ ID NO: 5324 - DNA, 23 bp, synthetic construct
  source 1..23: mol_type = other DNA
  modified_base 1..23: mod_base = OTHER; note = 2'-O-(2-methoxyethyl) nucleotide phosphorothioate
  modified_base 1: mod_base = OTHER; note = 5-methyl cytosine
  modified_base 3: mod_base = OTHER; note = 5-methyl cytosine
  modified_base 7: mod_base = OTHER; note = 5-methyl cytosine
  modified_base 10..12: mod_base = OTHER; note = 5-methyl cytosine
  modified_base 17: mod_base = OTHER; note = 5-methyl cytosine
  modified_base 8: mod_base = OTHER; note = A nucleoside-replacement group characterized by the lack of a nucleotide base
  modified_base 16: mod_base = OTHER; note = A nucleoside-replacement group characterized by the lack of a nucleotide base
cacaaacngcccaatnctgagtg

SEQ ID NO: 5325 - DNA, 23 bp, synthetic construct
  source 1..23: mol_type = other DNA
  modified_base 1..23: mod_base = OTHER; note = 2'-O-(2-methoxyethyl) nucleotide phosphorothioate
  modified_base 2: mod_base = OTHER; note = 5-methyl cytosine
  modified_base 4: mod_base = OTHER; note = 5-methyl cytosine
  modified_base 8: mod_base = OTHER; note = 5-methyl cytosine
  modified_base 11..13: mod_base = OTHER; note = 5-methyl cytosine
  modified_base 17..18: mod_base = OTHER; note = 5-methyl cytosine
acacaaacggcccaatcctgagt

SEQ ID NO: 5326 - DNA, 23 bp, synthetic construct
  source 1..23: mol_type = other DNA
  modified_base 1..23: mod_base = OTHER; note = 2'-O-(2-methoxyethyl) nucleotide phosphorothioate
  modified_base 2: mod_base = OTHER; note = 5-methyl cytosine
  modified_base 4: mod_base = OTHER; note = 5-methyl cytosine
  modified_base 11..13: mod_base = OTHER; note = 5-methyl cytosine
  modified_base 17..18: mod_base = OTHER; note = 5-methyl cytosine
  modified_base 8: mod_base = OTHER; note = A nucleoside-replacement group characterized by the lack of a nucleotide base
  modified_base 16: mod_base = OTHER; note = A nucleoside-replacement group characterized by the lack of a nucleotide base
acacaaanggcccaancctgagt

SEQ ID NO: 5327 - DNA, 23 bp, synthetic construct
  source 1..23: mol_type = other DNA
  modified_base 1..23: mod_base = OTHER; note = 2'-O-(2-methoxyethyl) nucleotide phosphorothioate
  modified_base 2: mod_base = OTHER; note = 5-methyl cytosine
  modified_base 6: mod_base = OTHER; note = 5-methyl cytosine
  modified_base 9..11: mod_base = OTHER; note = 5-methyl cytosine
  modified_base 15..16: mod_base = OTHER; note = 5-methyl cytosine
acaaacggcccaatcctgagtgg

SEQ ID NO: 5328 - DNA, 23 bp, synthetic construct
  source 1..23: mol_type = other DNA
  modified_base 1..23: mod_base = OTHER; note = 2'-O-(2-methoxyethyl) nucleotide phosphorothioate
  modified_base 2: mod_base = OTHER; note = 5-methyl cytosine
  modified_base 6: mod_base = OTHER; note = 5-methyl cytosine
  modified_base 9..11: mod_base = OTHER; note = 5-methyl cytosine
  modified_base 15: mod_base = OTHER; note = 5-methyl cytosine
  modified_base 8: mod_base = OTHER; note = A nucleoside-replacement group characterized by the lack of a nucleotide base
  modified_base 16: mod_base = OTHER; note = A nucleoside-replacement group characterized by the lack of a nucleotide base
acaaacgncccaatcntgagtgg

SEQ ID NO: 5329 - DNA, 25 bp, synthetic construct
  source 1..25: mol_type = other DNA
  modified_base 1..25: mod_base = OTHER; note = 2'-O-(2-methoxyethyl) nucleotide phosphorothioate
  modified_base 1: mod_base = OTHER; note = 5-methyl cytosine
  modified_base 5: mod_base = OTHER; note = 5-methyl cytosine
  modified_base 7: mod_base = OTHER; note = 5-methyl cytosine
  modified_base 11: mod_base = OTHER; note = 5-methyl cytosine
  modified_base 14..16: mod_base = OTHER; note = 5-methyl cytosine
  modified_base 20..21: mod_base = OTHER; note = 5-methyl cytosine
cagacacaaacggcccaatcctgag

SEQ ID NO: 5330 - DNA, 25 bp, synthetic construct
  source 1..25: mol_type = other DNA
  modified_base 1..25: mod_base = OTHER; note = 2'-O-(2-methoxyethyl) nucleotide phosphorothioate
  modified_base 1: mod_base = OTHER; note = 5-methyl cytosine
  modified_base 5..7: mod_base = OTHER; note = 5-methyl cytosine
  modified_base 11: mod_base = OTHER; note = 5-methyl cytosine
  modified_base 13: mod_base = OTHER; note = 5-methyl cytosine
  modified_base 17: mod_base = OTHER; note = 5-methyl cytosine
  modified_base 20..22: mod_base = OTHER; note = 5-methyl cytosine
catacccagacacaaacggcccaat

SEQ ID NO: 5331 - DNA, 25 bp, synthetic construct
  source 1..25: mol_type = other DNA
  modified_base 1..25: mod_base = OTHER; note = 2'-O-(2-methoxyethyl) nucleotide phosphorothioate
  modified_base 5: mod_base = OTHER; note = 5-methyl cytosine
  modified_base 9..11: mod_base = OTHER; note = 5-methyl cytosine
  modified_base 15: mod_base = OTHER; note = 5-methyl cytosine
  modified_base 17: mod_base = OTHER; note = 5-methyl cytosine
  modified_base 21: mod_base = OTHER; note = 5-methyl cytosine
  modified_base 24..25: mod_base = OTHER; note = 5-methyl cytosine
gagacatacccagacacaaacggcc

SEQ ID NO: 5332 - DNA, 25 bp, synthetic construct
  source 1..25: mol_type = other DNA
  modified_base 1..25: mod_base = OTHER; note = 2'-O-(2-methoxyethyl) nucleotide phosphorothioate
  modified_base 2: mod_base = OTHER; note = 5-methyl cytosine
  modified_base 5: mod_base = OTHER; note = 5-methyl cytosine
  modified_base 15: mod_base = OTHER; note = 5-methyl cytosine
  modified_base 19..21: mod_base = OTHER; note = 5-methyl cytosine
  modified_base 25: mod_base = OTHER; note = 5-methyl cytosine
gcagctggaagagacatacccagac

SEQ ID NO: 5333 - DNA, 25 bp, synthetic construct
  source 1..25: mol_type = other DNA
  modified_base 1..25: mod_base = OTHER; note = 2'-O-(2-methoxyethyl) nucleotide phosphorothioate
  modified_base 2: mod_base = OTHER; note = 5-methyl cytosine
  modified_base 5: mod_base = OTHER; note = 5-methyl cytosine
  modified_base 15: mod_base = OTHER; note = 5-methyl cytosine
  modified_base 20..21: mod_base = OTHER; note = 5-methyl cytosine
  modified_base 25: mod_base = OTHER; note = 5-methyl cytosine
  modified_base 7: mod_base = OTHER; note = A nucleoside-replacement group characterized by the lack of a nucleotide base
  modified_base 19: mod_base = OTHER; note = A nucleoside-replacement group characterized by the lack of a nucleotide base
gcagctngaagagacatanccagac

SEQ ID NO: 5334 - DNA, 25 bp, synthetic construct
  source 1..25: mol_type = other DNA
  modified_base 1..25: mod_base = OTHER; note = 2'-O-(2-methoxyethyl) nucleotide phosphorothioate
  modified_base 2: mod_base = OTHER; note = 5-methyl cytosine
  modified_base 5: mod_base = OTHER; note = 5-methyl cytosine
  modified_base 15: mod_base = OTHER; note = 5-methyl cytosine
  modified_base 20..21: mod_base = OTHER; note = 5-methyl cytosine
  modified_base 25: mod_base = OTHER; note = 5-methyl cytosine
  modified_base 9: mod_base = OTHER; note = A nucleoside-replacement group characterized by the lack of a nucleotide base
  modified_base 19: mod_base = OTHER; note = A nucleoside-replacement group characterized by the lack of a nucleotide base
gcagctggnagagacatanccagac

SEQ ID NO: 5335 - DNA, 25 bp, synthetic construct
  source 1..25: mol_type = other DNA
  modified_base 2: mod_base = OTHER; note = 5-methyl cytosine
  modified_base 6..7: mod_base = OTHER; note = 5-methyl cytosine
  modified_base 14..16: mod_base = OTHER; note = 5-methyl cytosine
  modified_base 20: mod_base = OTHER; note = 5-methyl cytosine
  modified_base 23: mod_base = OTHER; note = 5-methyl cytosine
  modified_base 1..25: mod_base = OTHER; note = 2'-O-(2-methoxyethyl) nucleotide phosphorothioate
tctttccaggaaacccaggcagctg

SEQ ID NO: 5336 - DNA, 25 bp, synthetic construct
  source 1..25: mol_type = other DNA
  modified_base 1..25: mod_base = OTHER; note = 2'-O-(2-methoxyethyl) nucleotide phosphorothioate
  modified_base 4: mod_base = OTHER; note = 5-methyl cytosine
  modified_base 8..9: mod_base = OTHER; note = 5-methyl cytosine
  modified_base 16..18: mod_base = OTHER; note = 5-methyl cytosine
  modified_base 22: mod_base = OTHER; note = 5-methyl cytosine
  modified_base 25: mod_base = OTHER; note = 5-methyl cytosine
gttctttccaggaaacccaggcagc

SEQ ID NO: 5337 - DNA, 23 bp, synthetic construct
  source 1..23: mol_type = other DNA
  modified_base 1..23: mod_base = OTHER; note = 2'-O-(2-methoxyethyl) nucleotide phosphorothioate
  modified_base 3: mod_base = OTHER; note = 5-methyl cytosine
  modified_base 7..8: mod_base = OTHER; note = 5-methyl cytosine
  modified_base 15..17: mod_base = OTHER; note = 5-methyl cytosine
  modified_base 21: mod_base = OTHER; note = 5-methyl cytosine
ttctttccaggaaacccaggcag

SEQ ID NO: 5338 - DNA, 23 bp, synthetic construct
  source 1..23: mol_type = other DNA
  modified_base 1..23: mod_base = OTHER; note = 2'-O-(2-methoxyethyl) nucleotide phosphorothioate
  modified_base 3: mod_base = OTHER; note = 5-methyl cytosine
  modified_base 7: mod_base = OTHER; note = 5-methyl cytosine
  modified_base 15: mod_base = OTHER; note = 5-methyl cytosine
  modified_base 17: mod_base = OTHER; note = 5-methyl cytosine
  modified_base 21: mod_base = OTHER; note = 5-methyl cytosine
  modified_base 8: mod_base = OTHER; note = A nucleoside-replacement group characterized by the lack of a nucleotide base
  modified_base 16: mod_base = OTHER; note = A nucleoside-replacement group characterized by the lack of a nucleotide base
ttctttcnaggaaacncaggcag

SEQ ID NO: 5339 - DNA, 23 bp, synthetic construct
  source 1..23: mol_type = other DNA
  modified_base 1..23: mod_base = OTHER; note = 2'-O-(2-methoxyethyl) nucleotide phosphorothioate
  modified_base 4: mod_base = OTHER; note = 5-methyl cytosine
  modified_base 8..9: mod_base = OTHER; note = 5-methyl cytosine
  modified_base 16..18: mod_base = OTHER; note = 5-methyl cytosine
  modified_base 22: mod_base = OTHER; note = 5-methyl cytosine
gttctttccaggaaacccaggca

SEQ ID NO: 5340 - DNA, 23 bp, synthetic construct
  source 1..23: mol_type = other DNA
  modified_base 1..23: mod_base = OTHER; note = 2'-O-(2-methoxyethyl) nucleotide phosphorothioate
  modified_base 4: mod_base = OTHER; note = 5-methyl cytosine
  modified_base 9: mod_base = OTHER; note = 5-methyl cytosine
  modified_base 17..18: mod_base = OTHER; note = 5-methyl cytosine
  modified_base 22: mod_base = OTHER; note = 5-methyl cytosine
  modified_base 8: mod_base = OTHER; note = A nucleoside-replacement group characterized by the lack of a nucleotide base
  modified_base 16: mod_base = OTHER; note = A nucleoside-replacement group characterized by the lack of a nucleotide base
gttctttncaggaaanccaggca

SEQ ID NO: 5341 - DNA, 23 bp, synthetic construct
  source 1..23: mol_type = other DNA
  modified_base 1..23: mod_base = OTHER; note = 2'-O-(2-methoxyethyl) nucleotide phosphorothioate
  modified_base 2: mod_base = OTHER; note = 5-methyl cytosine
  modified_base 6..7: mod_base = OTHER; note = 5-methyl cytosine
  modified_base 14..16: mod_base = OTHER; note = 5-methyl cytosine
  modified_base 20: mod_base = OTHER; note = 5-methyl cytosine
  modified_base 23: mod_base = OTHER; note = 5-methyl cytosine
tctttccaggaaacccaggcagc

SEQ ID NO: 5342 - DNA, 23 bp, synthetic construct
  source 1..23: mol_type = other DNA
  modified_base 1..23: mod_base = OTHER; note = 2'-O-(2-methoxyethyl) nucleotide phosphorothioate
  modified_base 2: mod_base = OTHER; note = 5-methyl cytosine
  modified_base 6..7: mod_base = OTHER; note = 5-methyl cytosine
  modified_base 14..15: mod_base = OTHER; note = 5-methyl cytosine
  modified_base 20: mod_base = OTHER; note = 5-methyl cytosine
  modified_base 23: mod_base = OTHER; note = 5-methyl cytosine
  modified_base 8: mod_base = OTHER; note = A nucleoside-replacement group characterized by the lack of a nucleotide base
  modified_base 16: mod_base = OTHER; note = A nucleoside-replacement group characterized by the lack of a nucleotide base
tctttccnggaaaccnaggcagc

SEQ ID NO: 5343 - DNA, 25 bp, synthetic construct
  source 1..25: mol_type = other DNA
  modified_base 1..25: mod_base = OTHER; note = 2'-O-(2-methoxyethyl) nucleotide phosphorothioate
  modified_base 1: mod_base = OTHER; note = 5-methyl cytosine
  modified_base 3: mod_base = OTHER; note = 5-methyl cytosine
  modified_base 8: mod_base = OTHER; note = 5-methyl cytosine
  modified_base 11..13: mod_base = OTHER; note = 5-methyl cytosine
  modified_base 15..16: mod_base = OTHER; note = 5-methyl cytosine
  modified_base 19: mod_base = OTHER; note = 5-methyl cytosine
  modified_base 21: mod_base = OTHER; note = 5-methyl cytosine
  modified_base 24..25: mod_base = OTHER; note = 5-methyl cytosine
cacgaatctacccaccaactcatcc

SEQ ID NO: 5344 - DNA, 25 bp, synthetic construct
  source 1..25: mol_type = other DNA
  modified_base 1..25: mod_base = OTHER; note = 2'-O-(2-methoxyethyl) nucleotide phosphorothioate
  modified_base 2: mod_base = OTHER; note = 5-methyl cytosine
  modified_base 6..7: mod_base = OTHER; note = 5-methyl cytosine
  modified_base 9: mod_base = OTHER; note = 5-methyl cytosine
  modified_base 14: mod_base = OTHER; note = 5-methyl cytosine
  modified_base 17..19: mod_base = OTHER; note = 5-methyl cytosine
  modified_base 21..22: mod_base = OTHER; note = 5-methyl cytosine
  modified_base 25: mod_base = OTHER; note = 5-methyl cytosine
tctagccacgaatctacccaccaac

SEQ ID NO: 5345 - DNA, 25 bp, synthetic construct
  source 1..25: mol_type = other DNA
  modified_base 1..25: mod_base = OTHER; note = 2'-O-(2-methoxyethyl) nucleotide phosphorothioate
  modified_base 3: mod_base = OTHER; note = 5-methyl cytosine
  modified_base 7..8: mod_base = OTHER; note = 5-methyl cytosine
  modified_base 10..11: mod_base = OTHER; note = 5-methyl cytosine
  modified_base 14..15: mod_base = OTHER; note = 5-methyl cytosine
  modified_base 17: mod_base = OTHER; note = 5-methyl cytosine
  modified_base 19: mod_base = OTHER; note = 5-methyl cytosine
  modified_base 21: mod_base = OTHER; note = 5-methyl cytosine
  modified_base 24..25: mod_base = OTHER; note = 5-methyl cytosine
gtctgtccaccagccactcacaacc

SEQ ID NO: 5346 - DNA, 25 bp, synthetic construct
  source 1..25: mol_type = other DNA
  modified_base 1..25: mod_base = OTHER; note = 2'-O-(2-methoxyethyl) nucleotide phosphorothioate
  modified_base 3: mod_base = OTHER; note = 5-methyl cytosine
  modified_base 6: mod_base = OTHER; note = 5-methyl cytosine
  modified_base 10..11: mod_base = OTHER; note = 5-methyl cytosine
  modified_base 13..14: mod_base = OTHER; note = 5-methyl cytosine
  modified_base 17..18: mod_base = OTHER; note = 5-methyl cytosine
  modified_base 20: mod_base = OTHER; note = 5-methyl cytosine
  modified_base 22: mod_base = OTHER; note = 5-methyl cytosine
  modified_base 24: mod_base = OTHER; note = 5-methyl cytosine
ttcgtctgtccaccagccactcaca

SEQ ID NO: 5347 - DNA, 25 bp, synthetic construct
  source 1..25: mol_type = other DNA
  modified_base 1..25: mod_base = OTHER; note = 2'-O-(2-methoxyethyl) nucleotide phosphorothioate
  modified_base 2..3: mod_base = OTHER; note = 5-methyl cytosine
  modified_base 10: mod_base = OTHER; note = 5-methyl cytosine
  modified_base 13: mod_base = OTHER; note = 5-methyl cytosine
  modified_base 17..18: mod_base = OTHER; note = 5-methyl cytosine
  modified_base 20..21: mod_base = OTHER; note = 5-methyl cytosine
  modified_base 24..25: mod_base = OTHER; note = 5-methyl cytosine
tccatttttcgtctgtccaccagcc

SEQ ID NO: 5348 - DNA, 25 bp, synthetic construct
  source 1..25: mol_type = other DNA
  modified_base 1..25: mod_base = OTHER; note = 2'-O-(2-methoxyethyl) nucleotide phosphorothioate
  modified_base 4..5: mod_base = OTHER; note = 5-methyl cytosine
  modified_base 7: mod_base = OTHER; note = 5-methyl cytosine
  modified_base 10: mod_base = OTHER; note = 5-methyl cytosine
  modified_base 16..17: mod_base = OTHER; note = 5-methyl cytosine
  modified_base 19..20: mod_base = OTHER; note = 5-methyl cytosine
  modified_base 23..25: mod_base = OTHER; note = 5-methyl cytosine
gatccgcaacttaatccacctaccc

SEQ ID NO: 5349 - DNA, 23 bp, synthetic construct
  source 1..23: mol_type = other DNA
  modified_base 1..23: mod_base = OTHER; note = 2'-O-(2-methoxyethyl) nucleotide phosphorothioate
  modified_base 3..4: mod_base = OTHER; note = 5-methyl cytosine
  modified_base 6: mod_base = OTHER; note = 5-methyl cytosine
  modified_base 9: mod_base = OTHER; note = 5-methyl cytosine
  modified_base 15..16: mod_base = OTHER; note = 5-methyl cytosine
  modified_base 18..19: mod_base = OTHER; note = 5-methyl cytosine
  modified_base 22..23: mod_base = OTHER; note = 5-methyl cytosine
atccgcaacttaatccacctacc

SEQ ID NO: 5350 - DNA, 23 bp, synthetic construct
  source 1..23: mol_type = other DNA
  modified_base 1..23: mod_base = OTHER; note = 2'-O-(2-methoxyethyl) nucleotide phosphorothioate
  modified_base 8: mod_base = OTHER; note = A nucleoside-replacement group characterized by the lack of a nucleotide base
  modified_base 16: mod_base = OTHER; note = A nucleoside-replacement group characterized by the lack of a nucleotide base
  modified_base 3..4: mod_base = OTHER; note = 5-methyl cytosine
  modified_base 6: mod_base = OTHER; note = 5-methyl cytosine
  modified_base 9: mod_base = OTHER; note = 5-methyl cytosine
  modified_base 15: mod_base = OTHER; note = 5-methyl cytosine
  modified_base 18..19: mod_base = OTHER; note = 5-methyl cytosine
  modified_base 22..23: mod_base = OTHER; note = 5-methyl cytosine
atccgcancttaatcnacctacc

SEQ ID NO: 5351 - DNA, 23 bp, synthetic construct
  source 1..23: mol_type = other DNA
  modified_base 1..23: mod_base = OTHER; note = 2'-O-(2-methoxyethyl) nucleotide phosphorothioate
  modified_base 4..5: mod_base = OTHER; note = 5-methyl cytosine
  modified_base 7: mod_base = OTHER; note = 5-methyl cytosine
  modified_base 10: mod_base = OTHER; note = 5-methyl cytosine
  modified_base 16..17: mod_base = OTHER; note = 5-methyl cytosine
  modified_base 19..20: mod_base = OTHER; note = 5-methyl cytosine
  modified_base 23: mod_base = OTHER; note = 5-methyl cytosine
gatccgcaacttaatccacctac

SEQ ID NO: 5352 - DNA, 23 bp, synthetic construct
  source 1..23: mol_type = other DNA
  modified_base 1..23: mod_base = OTHER; note = 2'-O-(2-methoxyethyl) nucleotide phosphorothioate
  modified_base 8: mod_base = OTHER; note = A nucleoside-replacement group characterized by the lack of a nucleotide base
  modified_base 16: mod_base = OTHER; note = A nucleoside-replacement group characterized by the lack of a nucleotide base
  modified_base 4..5: mod_base = OTHER; note = 5-methyl cytosine
  modified_base 7: mod_base = OTHER; note = 5-methyl cytosine
  modified_base 10: mod_base = OTHER; note = 5-methyl cytosine
  modified_base 17: mod_base = OTHER; note = 5-methyl cytosine
  modified_base 19..20: mod_base = OTHER; note = 5-methyl cytosine
  modified_base 23: mod_base = OTHER; note = 5-methyl cytosine
gatccgcnacttaatncacctac

SEQ ID NO: 5353 - DNA, 23 bp, synthetic construct
  source 1..23: mol_type = other DNA
  modified_base 1..23: mod_base = OTHER; note = 2'-O-(2-methoxyethyl) nucleotide phosphorothioate
  modified_base 2..3: mod_base = OTHER; note = 5-methyl cytosine
  modified_base 5: mod_base = OTHER; note = 5-methyl cytosine
  modified_base 8: mod_base = OTHER; note = 5-methyl cytosine
  modified_base 14..15: mod_base = OTHER; note = 5-methyl cytosine
  modified_base 17..18: mod_base = OTHER; note = 5-methyl cytosine
  modified_base 21..23: mod_base = OTHER; note = 5-methyl cytosine
tccgcaacttaatccacctaccc

SEQ ID NO: 5354 - DNA, 23 bp, synthetic construct
  source 1..23: mol_type = other DNA
  modified_base 1..23: mod_base = OTHER; note = 2'-O-(2-methoxyethyl) nucleotide phosphorothioate
  modified_base 8: mod_base = OTHER; note = A nucleoside-replacement group characterized by the lack of a nucleotide base
  modified_base 16: mod_base = OTHER; note = A nucleoside-replacement group characterized by the lack of a nucleotide base
  modified_base 2..3: mod_base = OTHER; note = 5-methyl cytosine
  modified_base 5: mod_base = OTHER; note = 5-methyl cytosine
  modified_base 14..15: mod_base = OTHER; note = 5-methyl cytosine
  modified_base 17..18: mod_base = OTHER; note = 5-methyl cytosine
  modified_base 21..23: mod_base = OTHER; note = 5-methyl cytosine
tccgcaanttaatccncctaccc

SEQ ID NO: 5355 - DNA, 25 bp, synthetic construct
  source 1..25: mol_type = other DNA
  modified_base 1..25: mod_base = OTHER; note = 2'-O-(2-methoxyethyl) nucleotide phosphorothioate
  modified_base 1: mod_base = OTHER; note = 5-methyl cytosine
  modified_base 3..5: mod_base = OTHER; note = 5-methyl cytosine
  modified_base 7..9: mod_base = OTHER; note = 5-methyl cytosine
  modified_base 12: mod_base = OTHER; note = 5-methyl cytosine
  modified_base 16: mod_base = OTHER; note = 5-methyl cytosine
  modified_base 19..22: mod_base = OTHER; note = 5-methyl cytosine
cacccacccatctaactaccccaaa

SEQ ID NO: 5356 - DNA, 23 bp, synthetic construct
  source 1..23: mol_type = other DNA
  modified_base 1..23: mod_base = OTHER; note = 2'-O-(2-methoxyethyl) nucleotide phosphorothioate
  modified_base 2..4: mod_base = OTHER; note = 5-methyl cytosine
  modified_base 6..8: mod_base = OTHER; note = 5-methyl cytosine
  modified_base 11: mod_base = OTHER; note = 5-methyl cytosine
  modified_base 15: mod_base = OTHER; note = 5-methyl cytosine
  modified_base 18..21: mod_base = OTHER; note = 5-methyl cytosine
acccacccatctaactaccccaa

SEQ ID NO: 5357 - DNA, 23 bp, synthetic construct
  source 1..23: mol_type = other DNA
  modified_base 1..23: mod_base = OTHER; note = 2'-O-(2-methoxyethyl) nucleotide phosphorothioate
  modified_base 8: mod_base = OTHER; note = A nucleoside-replacement group characterized by the lack of a nucleotide base
  modified_base 16: mod_base = OTHER; note = A nucleoside-replacement group characterized by the lack of a nucleotide base
  modified_base 2..4: mod_base = OTHER; note = 5-methyl cytosine
  modified_base 6..7: mod_base = OTHER; note = 5-methyl cytosine
  modified_base 11: mod_base = OTHER; note = 5-methyl cytosine
  modified_base 15: mod_base = OTHER; note = 5-methyl cytosine
  modified_base 18..21: mod_base = OTHER; note = 5-methyl cytosine
acccaccnatctaacnaccccaa

SEQ ID NO: 5358 - DNA, 23 bp, synthetic construct
  source 1..23: mol_type = other DNA
  modified_base 1..23: mod_base = OTHER; note = 2'-O-(2-methoxyethyl) nucleotide phosphorothioate
  modified_base 1: mod_base = OTHER; note = 5-methyl cytosine
  modified_base 3..5: mod_base = OTHER; note = 5-methyl cytosine
  modified_base 7..9: mod_base = OTHER; note = 5-methyl cytosine
  modified_base 12: mod_base = OTHER; note = 5-methyl cytosine
  modified_base 16: mod_base = OTHER; note = 5-methyl cytosine
  modified_base 19..22: mod_base = OTHER; note = 5-methyl cytosine
cacccacccatctaactacccca

SEQ ID NO: 5359 - DNA, 23 bp, synthetic construct
  source 1..23: mol_type = other DNA
  modified_base 1..23: mod_base = OTHER; note = 2'-O-(2-methoxyethyl) nucleotide phosphorothioate
  modified_base 8: mod_base = OTHER; note = A nucleoside-replacement group characterized by the lack of a nucleotide base
  modified_base 16: mod_base = OTHER; note = A nucleoside-replacement group characterized by the lack of a nucleotide base
  modified_base 1: mod_base = OTHER; note = 5-methyl cytosine
  modified_base 3..5: mod_base = OTHER; note = 5-methyl cytosine
  modified_base 7: mod_base = OTHER; note = 5-methyl cytosine
  modified_base 9: mod_base = OTHER; note = 5-methyl cytosine
  modified_base 12: mod_base = OTHER; note = 5-methyl cytosine
  modified_base 19..22: mod_base = OTHER; note = 5-methyl cytosine
cacccacncatctaantacccca

SEQ ID NO: 5360 - DNA, 23 bp, synthetic construct
  source 1..23: mol_type = other DNA
  modified_base 1..23: mod_base = OTHER; note = 2'-O-(2-methoxyethyl) nucleotide phosphorothioate
  modified_base 1..3: mod_base = OTHER; note = 5-methyl cytosine
  modified_base 5..7: mod_base = OTHER; note = 5-methyl cytosine
  modified_base 10: mod_base = OTHER; note = 5-methyl cytosine
  modified_base 14: mod_base = OTHER; note = 5-methyl cytosine
  modified_base 17..20: mod_base = OTHER; note = 5-methyl cytosine
cccacccatctaactaccccaaa

SEQ ID NO: 5361 - DNA, 23 bp, synthetic construct
  source 1..23: mol_type = other DNA
  modified_base 1..23: mod_base = OTHER; note = 2'-O-(2-methoxyethyl) nucleotide phosphorothioate
  modified_base 8: mod_base = OTHER; note = A nucleoside-replacement group characterized by the lack of a nucleotide base
  modified_base 16: mod_base = OTHER; note = A nucleoside-replacement group characterized by the lack of a nucleotide base
  modified_base 1..3: mod_base = OTHER; note = 5-methyl cytosine
  modified_base 5..7: mod_base = OTHER; note = 5-methyl cytosine
  modified_base 10: mod_base = OTHER; note = 5-methyl cytosine
  modified_base 14: mod_base = OTHER; note = 5-methyl cytosine
  modified_base 17..20: mod_base = OTHER; note = 5-methyl cytosine
cccacccntctaactnccccaaa

SEQ ID NO: 5362 - DNA, 25 bp, synthetic construct
  source 1..25: mol_type = other DNA
  modified_base 1..25: mod_base = OTHER; note = 2'-O-(2-methoxyethyl) nucleotide phosphorothioate
  modified_base 9: mod_base = OTHER; note = 5-methyl cytosine
  modified_base 20: mod_base = OTHER; note = 5-methyl cytosine
gaaagtgtcatggagagtgcaaggg

SEQ ID NO: 5363 - DNA, 23 bp, synthetic construct
  source 1..23: mol_type = other DNA
  modified_base 1..23: mod_base = OTHER; note = 2'-O-(2-methoxyethyl) nucleotide phosphorothioate
  modified_base 8: mod_base = OTHER; note = 5-methyl cytosine
  modified_base 19: mod_base = OTHER; note = 5-methyl cytosine
aaagtgtcatggagagtgcaagg

SEQ ID NO: 5364 - DNA, 23 bp, synthetic construct
  source 1..23: mol_type = other DNA
  modified_base 1..23: mod_base = OTHER; note = 2'-O-(2-methoxyethyl) nucleotide phosphorothioate
  modified_base 8: mod_base = OTHER; note = A nucleoside-replacement group characterized by the lack of a nucleotide base
  modified_base 16: mod_base = OTHER; note = A nucleoside-replacement group characterized by the lack of a nucleotide base
  modified_base 19: mod_base = OTHER; note = 5-methyl cytosine
aaagtgtnatggagantgcaagg

SEQ ID NO: 5365 - DNA, 23 bp, synthetic construct
  source 1..23: mol_type = other DNA
  modified_base 1..23: mod_base = OTHER; note = 2'-O-(2-methoxyethyl) nucleotide phosphorothioate
  modified_base 9: mod_base = OTHER; note = 5-methyl cytosine
  modified_base 20: mod_base = OTHER; note = 5-methyl cytosine
gaaagtgtcatggagagtgcaag

SEQ ID NO: 5366 - DNA, 23 bp, synthetic construct
  source 1..23: mol_type = other DNA
  modified_base 1..23: mod_base = OTHER; note = 2'-O-(2-methoxyethyl) nucleotide phosphorothioate
  modified_base 8: mod_base = OTHER; note = A nucleoside-replacement group characterized by the lack of a nucleotide base
  modified_base 16: mod_base = OTHER; note = A nucleoside-replacement group characterized by the lack of a nucleotide base
  modified_base 9: mod_base = OTHER; note = 5-methyl cytosine
  modified_base 20: mod_base = OTHER; note = 5-methyl cytosine
gaaagtgncatggagngtgcaag

SEQ ID NO: 5367 - DNA, 23 bp, synthetic construct
  source 1..23: mol_type = other DNA
  modified_base 1..23: mod_base = OTHER; note = 2'-O-(2-methoxyethyl) nucleotide phosphorothioate
  modified_base 7: mod_base = OTHER; note = 5-methyl cytosine
  modified_base 18: mod_base = OTHER; note = 5-methyl cytosine
aagtgtcatggagagtgcaaggg

SEQ ID NO: 5368 - DNA, 23 bp, synthetic construct
  source 1..23: mol_type = other DNA
  modified_base 1..23: mod_base = OTHER; note = 2'-O-(2-methoxyethyl) nucleotide phosphorothioate
  modified_base 8: mod_base = OTHER; note = A nucleoside-replacement group characterized by the lack of a nucleotide base
  modified_base 16: mod_base = OTHER; note = A nucleoside-replacement group characterized by the lack of a nucleotide base
  modified_base 7: mod_base = OTHER; note = 5-methyl cytosine
  modified_base 18: mod_base = OTHER; note = 5-methyl cytosine
aagtgtcntggagagngcaaggg

SEQ ID NO: 5369 - DNA, 25 bp, synthetic construct
  source 1..25: mol_type = other DNA
  modified_base 1..25: mod_base = OTHER; note = 2'-O-(2-methoxyethyl) nucleotide phosphorothioate
  modified_base 7: mod_base = OTHER; note = A nucleoside-replacement group characterized by the lack of a nucleotide base
  modified_base 19: mod_base = OTHER; note = A nucleoside-replacement group characterized by the lack of a nucleotide base
  modified_base 9: mod_base = OTHER; note = 5-methyl cytosine
  modified_base 20: mod_base = OTHER; note = 5-methyl cytosine
gaaagtntcatggagagtncaaggg

SEQ ID NO: 5370 - DNA, 25 bp, synthetic construct
  source 1..25: mol_type = other DNA
  modified_base 1..25: mod_base = OTHER; note = 2'-O-(2-methoxyethyl) nucleotide phosphorothioate
  modified_base 9: mod_base = OTHER; note = A nucleoside-replacement group characterized by the lack of a nucleotide base
  modified_base 19: mod_base = OTHER; note = A nucleoside-replacement group characterized by the lack of a nucleotide base
  modified_base 20: mod_base = OTHER; note = 5-methyl cytosine
gaaagtgtnatggagagtncaaggg

SEQ ID NO: 5371 - DNA, 25 bp, synthetic construct
  source 1..25: mol_type = other DNA
  modified_base 1..25: mod_base = OTHER; note = 2'-O-(2-methoxyethyl) nucleotide phosphorothioate
  modified_base 1: mod_base = OTHER; note = 5-methyl cytosine
  modified_base 3..4: mod_base = OTHER; note = 5-methyl cytosine
  modified_base 21: mod_base = OTHER; note = 5-methyl cytosine
caccatgggagagaaagtgtcatgg

SEQ ID NO: 5372 - DNA, 25 bp, synthetic construct
  source 1..25: mol_type = other DNA
  modified_base 1..25: mod_base = OTHER; note = 2'-O-(2-methoxyethyl) nucleotide phosphorothioate
  modified_base 5: mod_base = OTHER; note = 5-methyl cytosine
  modified_base 9..11: mod_base = OTHER; note = 5-methyl cytosine
  modified_base 15: mod_base = OTHER; note = 5-methyl cytosine
  modified_base 17: mod_base = OTHER; note = 5-methyl cytosine
  modified_base 21: mod_base = OTHER; note = 5-methyl cytosine
  modified_base 24..25: mod_base = OTHER; note = 5-methyl cytosine
gagacatacccagacacaaacggcc

SEQ ID NO: 5373 - DNA, 23 bp, synthetic construct
  source 1..23: mol_type = other DNA
  modified_base 1..23: mod_base = OTHER; note = 2'-O-(2-methoxyethyl) nucleotide phosphorothioate
  modified_base 4: mod_base = OTHER; note = 5-methyl cytosine
  modified_base 8..9: mod_base = OTHER; note = 5-methyl cytosine
  modified_base 16..18: mod_base = OTHER; note = 5-methyl cytosine
  modified_base 22: mod_base = OTHER; note = 5-methyl cytosine
gttctttccaggaaacccaggca

SEQ ID NO: 5374 - DNA, 23 bp, synthetic construct
  source 1..23: mol_type = other DNA
  modified_base 1..23: mod_base = OTHER; note = 2'-O-(2-methoxyethyl) nucleotide phosphorothioate
  modified_base 8: mod_base = OTHER; note = A nucleoside-replacement group characterized by the lack of a nucleotide base
  modified_base 16: mod_base = OTHER; note = A nucleoside-replacement group characterized by the lack of a nucleotide base
  modified_base 4: mod_base = OTHER; note = 5-methyl cytosine
  modified_base 9: mod_base = OTHER; note = 5-methyl cytosine
  modified_base 17..18: mod_base = OTHER; note = 5-methyl cytosine
  modified_base 22: mod_base = OTHER; note = 5-methyl cytosine
gttctttncaggaaanccaggca

SEQ ID NO: 5375 - DNA, 25 bp, synthetic construct
  source 1..25: mol_type = other DNA
  modified_base 1..25: mod_base = OTHER; note = 2'-O-(2-methoxyethyl) nucleotide phosphorothioate
  modified_base 9: mod_base = OTHER; note = A nucleoside-replacement group characterized by the lack of a nucleotide base
  modified_base 19: mod_base = OTHER; note = A nucleoside-replacement group characterized by the lack of a nucleotide base
  modified_base 2: mod_base = OTHER; note = 5-methyl cytosine
  modified_base 5: mod_base = OTHER; note = 5-methyl cytosine
  modified_base 15: mod_base = OTHER; note = 5-methyl cytosine
  modified_base 20..21: mod_base = OTHER; note = 5-methyl cytosine
  modified_base 25: mod_base = OTHER; note = 5-methyl cytosine
gcagctggnagagacatanccagac

SEQ ID NO: 5376 - DNA, 25 bp, synthetic construct
  source 1..25: mol_type = other DNA
  modified_base 1..25: mod_base = OTHER; note = 2'-O-(2-methoxyethyl) nucleotide phosphorothioate
  modified_base 4: mod_base = OTHER; note = 5-methyl cytosine
  modified_base 8..9: mod_base = OTHER; note = 5-methyl cytosine
  modified_base 16..18: mod_base = OTHER; note = 5-methyl cytosine
  modified_base 22: mod_base = OTHER; note = 5-methyl cytosine
  modified_base 25: mod_base = OTHER; note = 5-methyl cytosine
gttctttccaggaaacccaggcagc

SEQ ID NO: 5377 - DNA, 25 bp, synthetic construct
  source 1..25: mol_type = other DNA
  modified_base 1..25: mod_base = OTHER; note = 2'-O-(2-methoxyethyl) nucleotide phosphorothioate
  modified_base 7: mod_base = OTHER; note = A nucleoside-replacement group characterized by the lack of a nucleotide base
  modified_base 19: mod_base = OTHER; note = A nucleoside-replacement group characterized by the lack of a nucleotide base
  modified_base 2: mod_base = OTHER; note = 5-methyl cytosine
  modified_base 5: mod_base = OTHER; note = 5-methyl cytosine
  modified_base 15: mod_base = OTHER; note = 5-methyl cytosine
  modified_base 20..21: mod_base = OTHER; note = 5-methyl cytosine
  modified_base 25: mod_base = OTHER; note = 5-methyl cytosine
gcagctngaagagacatanccagac

SEQ ID NO: 5378 - DNA, 25 bp, synthetic construct
  source 1..25: mol_type = other DNA
  modified_base 1..25: mod_base = OTHER; note = 2'-O-(2-methoxyethyl) nucleotide phosphorothioate
  modified_base 2: mod_base = OTHER; note = 5-methyl cytosine
  modified_base 5: mod_base = OTHER; note = 5-methyl cytosine
  modified_base 15: mod_base = OTHER; note = 5-methyl cytosine
  modified_base 19..21: mod_base = OTHER; note = 5-methyl cytosine
  modified_base 25: mod_base = OTHER; note = 5-methyl cytosine
gcagctggaagagacatacccagac

SEQ ID NO: 5379 - DNA, 23 bp, synthetic construct
  source 1..23: mol_type = other DNA
  modified_base 1..23: mod_base = OTHER; note = 2'-O-(2-methoxyethyl) nucleotide phosphorothioate
  modified_base 3: mod_base = OTHER; note = 5-methyl cytosine
  modified_base 7..8: mod_base = OTHER; note = 5-methyl cytosine
  modified_base 15..17: mod_base = OTHER; note = 5-methyl cytosine
  modified_base 21: mod_base = OTHER; note = 5-methyl cytosine
ttctttccaggaaacccaggcag

SEQ ID NO: 5380 - DNA, 23 bp, synthetic construct
  source 1..23: mol_type = other DNA
  modified_base 1..23: mod_base = OTHER; note = 2'-O-(2-methoxyethyl) nucleotide phosphorothioate
  modified_base 2: mod_base = OTHER; note = 5-methyl cytosine
  modified_base 5..6: mod_base = OTHER; note = 5-methyl cytosine
  modified_base 9..10: mod_base = OTHER; note = 5-methyl cytosine
  modified_base 13..14: mod_base = OTHER; note = 5-methyl cytosine
  modified_base 17..18: mod_base = OTHER; note = 5-methyl cytosine
  modified_base 22: mod_base = OTHER; note = 5-methyl cytosine
acatccatccatccatccattca

SEQ ID NO: 5381 - DNA, 23 bp, synthetic construct
  source 1..23: mol_type = other DNA
  modified_base 1..23: mod_base = OTHER; note = 2'-O-(2-methoxyethyl) nucleotide phosphorothioate
  modified_base 8: mod_base = OTHER; note = A nucleoside-replacement group characterized by the lack of a nucleotide base
  modified_base 16: mod_base = OTHER; note = A nucleoside-replacement group characterized by the lack of a nucleotide base
  modified_base 2: mod_base = OTHER; note = 5-methyl cytosine
  modified_base 6..7: mod_base = OTHER; note = 5-methyl cytosine
  modified_base 14..15: mod_base = OTHER; note = 5-methyl cytosine
  modified_base 20: mod_base = OTHER; note = 5-methyl cytosine
  modified_base 23: mod_base = OTHER; note = 5-methyl cytosine
tctttccnggaaaccnaggcagc

SEQ ID NO: 5382 - DNA, 23 bp, synthetic construct
  source 1..23: mol_type = other DNA
  modified_base 1..23: mod_base = OTHER; note = 2'-O-(2-methoxyethyl) nucleotide phosphorothioate
  modified_base 8: mod_base = OTHER; note = A nucleoside-replacement group characterized by the lack of a nucleotide base
  modified_base 16: mod_base = OTHER; note = A nucleoside-replacement group characterized by the lack of a nucleotide base
  modified_base 3: mod_base = OTHER; note = 5-methyl cytosine
  modified_base 7: mod_base = OTHER; note = 5-methyl cytosine
  modified_base 15: mod_base = OTHER; note = 5-methyl cytosine
  modified_base 17: mod_base = OTHER; note = 5-methyl cytosine
  modified_base 21: mod_base = OTHER; note = 5-methyl cytosine
ttctttcnaggaaacncaggcag

SEQ ID NO: 5383 - DNA, 25 bp, synthetic construct
  source 1..25: mol_type = other DNA
  modified_base 1..25: mod_base = OTHER; note = 2'-O-(2-methoxyethyl) nucleotide phosphorothioate
  modified_base 2: mod_base = OTHER; note = 5-methyl cytosine
  modified_base 4: mod_base = OTHER; note = 5-methyl cytosine
  modified_base 7..8: mod_base = OTHER; note = 5-methyl cytosine
  modified_base 11..12: mod_base = OTHER; note = 5-methyl cytosine
  modified_base 15..16: mod_base = OTHER; note = 5-methyl cytosine
  modified_base 19..20: mod_base = OTHER; note = 5-methyl cytosine
  modified_base 24: mod_base = OTHER; note = 5-methyl cytosine
acacatccatccatccatccattca

SEQ ID NO: 5384 - DNA, 23 bp, synthetic construct
  source 1..23: mol_type = other DNA
  modified_base 1..23: mod_base = OTHER; note = 2'-O-(2-methoxyethyl) nucleotide phosphorothioate
  modified_base 2: mod_base = OTHER; note = 5-methyl cytosine
  modified_base 6..7: mod_base = OTHER; note = 5-methyl cytosine
  modified_base 14..16: mod_base = OTHER; note = 5-methyl cytosine
  modified_base 20: mod_base = OTHER; note = 5-methyl cytosine
  modified_base 23: mod_base = OTHER; note = 5-methyl cytosine
tctttccaggaaacccaggcagc

SEQ ID NO: 5385 - DNA, 25 bp, synthetic construct
  source 1..25: mol_type = other DNA
  modified_base 1..25: mod_base = OTHER; note = 2'-O-(2-methoxyethyl) nucleotide phosphorothioate
  modified_base 1: mod_base = OTHER; note = 5-methyl cytosine
  modified_base 5..7: mod_base = OTHER; note = 5-methyl cytosine
  modified_base 11: mod_base = OTHER; note = 5-methyl cytosine
  modified_base 13: mod_base = OTHER; note = 5-methyl cytosine
  modified_base 17: mod_base = OTHER; note = 5-methyl cytosine
  modified_base 20..22: mod_base = OTHER; note = 5-methyl cytosine
catacccagacacaaacggcccaat

SEQ ID NO: 5386 - DNA, 25 bp, synthetic construct
  source 1..25: mol_type = other DNA
  modified_base 1..25: mod_base = OTHER; note = 2'-O-(2-methoxyethyl) nucleotide phosphorothioate
  modified_base 1: mod_base = OTHER; note = 5-methyl cytosine
  modified_base 3: mod_base = OTHER; note = 5-methyl cytosine
  modified_base 10..11: mod_base = OTHER; note = 5-methyl cytosine
  modified_base 14..15: mod_base = OTHER; note = 5-methyl cytosine
  modified_base 17: mod_base = OTHER; note = 5-methyl cytosine
  modified_base 19: mod_base = OTHER; note = 5-methyl cytosine
  modified_base 21..23: mod_base = OTHER; note = 5-methyl cytosine
  modified_base 25: mod_base = OTHER; note = 5-methyl cytosine
ctcttttatccatccacacacccac

SEQ ID NO: 5387 - DNA, 23 bp, synthetic construct
  source 1..23: mol_type = other DNA
  modified_base 1..23: mod_base = OTHER; note = 2'-O-(2-methoxyethyl) nucleotide phosphorothioate
  modified_base 1: mod_base = OTHER; note = 5-methyl cytosine
  modified_base 3: mod_base = OTHER; note = 5-methyl cytosine
  modified_base 10..11: mod_base = OTHER; note = 5-methyl cytosine
  modified_base 14..15: mod_base = OTHER; note = 5-methyl cytosine
  modified_base 17: mod_base = OTHER; note = 5-methyl cytosine
  modified_base 19: mod_base = OTHER; note = 5-methyl cytosine
  modified_base 21..23: mod_base = OTHER; note = 5-methyl cytosine
ctcttttatccatccacacaccc

SEQ ID NO: 5388 - DNA, 25 bp, synthetic construct
  source 1..25: mol_type = other DNA
  modified_base 1..25: mod_base = OTHER; note = 2'-O-(2-methoxyethyl) nucleotide phosphorothioate
  modified_base 2: mod_base = OTHER; note = 5-methyl cytosine
  modified_base 6..7: mod_base = OTHER; note = 5-methyl cytosine
  modified_base 14..16: mod_base = OTHER; note = 5-methyl cytosine
  modified_base 20: mod_base = OTHER; note = 5-methyl cytosine
  modified_base 23: mod_base = OTHER; note = 5-methyl cytosine
tctttccaggaaacccaggcagctg

SEQ ID NO: 5389 - DNA, 23 bp, synthetic construct
  source 1..23: mol_type = other DNA
  modified_base 1..23: mod_base = OTHER; note = 2'-O-(2-methoxyethyl) nucleotide phosphorothioate
  modified_base 8: mod_base = OTHER; note = A nucleoside-replacement group characterized by the lack of a nucleotide base
  modified_base 16: mod_base = OTHER; note = A nucleoside-replacement group characterized by the lack of a nucleotide base
  modified_base 9: mod_base = OTHER; note = 5-methyl cytosine
  modified_base 20: mod_base = OTHER; note = 5-methyl cytosine
gaaagtgncatggagngtgcaag

SEQ ID NO: 5390 - DNA, 25 bp, synthetic construct
  source 1..25: mol_type = other DNA
  modified_base 1..25: mod_base = OTHER; note = 2'-O-(2-methoxyethyl) nucleotide phosphorothioate
  modified_base 7: mod_base = OTHER; note = A nucleoside-replacement group characterized by the lack of a nucleotide base
  modified_base 19: mod_base = OTHER; note = A nucleoside-replacement group characterized by the lack of a nucleotide base
  modified_base 3: mod_base = OTHER; note = 5-methyl cytosine
  modified_base 6: mod_base = OTHER; note = 5-methyl cytosine
  modified_base 8: mod_base = OTHER; note = 5-methyl cytosine
  modified_base 15..16: mod_base = OTHER; note = 5-methyl cytosine
  modified_base 20: mod_base = OTHER; note = 5-methyl cytosine
  modified_base 22: mod_base = OTHER; note = 5-methyl cytosine
  modified_base 24: mod_base = OTHER; note = 5-methyl cytosine
atctacncttttatccatncacaca

SEQ ID NO: 5391 - DNA, 25 bp, synthetic construct
  source 1..25: mol_type = other DNA
  modified_base 1..25: mod_base = OTHER; note = 2'-O-(2-methoxyethyl) nucleotide phosphorothioate
  modified_base 3: mod_base = OTHER; note = 5-methyl cytosine
  modified_base 6: mod_base = OTHER; note = 5-methyl cytosine
  modified_base 8: mod_base = OTHER; note = 5-methyl cytosine
  modified_base 15..16: mod_base = OTHER; note = 5-methyl cytosine
  modified_base 19..20: mod_base = OTHER; note = 5-methyl cytosine
  modified_base 22: mod_base = OTHER; note = 5-methyl cytosine
  modified_base 24: mod_base = OTHER; note = 5-methyl cytosine
atctactcttttatccatccacaca

SEQ ID NO: 5392 - DNA, 23 bp, synthetic construct
  source 1..23: mol_type = other DNA
  modified_base 1..23: mod_base = OTHER; note = 2'-O-(2-methoxyethyl) nucleotide phosphorothioate
  modified_base 2: mod_base = OTHER; note = 5-methyl cytosine
  modified_base 4: mod_base = OTHER; note = 5-methyl cytosine
  modified_base 7..8: mod_base = OTHER; note = 5-methyl cytosine
  modified_base 11..12: mod_base = OTHER; note = 5-methyl cytosine
  modified_base 15..16: mod_base = OTHER; note = 5-methyl cytosine
  modified_base 19..20: mod_base = OTHER; note = 5-methyl cytosine
acacatccatccatccatccatt

SEQ ID NO: 5393 - DNA, 23 bp, synthetic construct
  source 1..23: mol_type = other DNA
  modified_base 1..23: mod_base = OTHER; note = 2'-O-(2-methoxyethyl) nucleotide phosphorothioate
  modified_base 8: mod_base = OTHER; note = A nucleoside-replacement group characterized by the lack of a nucleotide base
  modified_base 16: mod_base = OTHER; note = A nucleoside-replacement group characterized by the lack of a nucleotide base
  modified_base 1: mod_base = OTHER; note = 5-methyl cytosine
  modified_base 4: mod_base = OTHER; note = 5-methyl cytosine
  modified_base 6: mod_base = OTHER; note = 5-methyl cytosine
  modified_base 13..14: mod_base = OTHER; note = 5-methyl cytosine
  modified_base 17..18: mod_base = OTHER; note = 5-methyl cytosine
  modified_base 20: mod_base = OTHER; note = 5-methyl cytosine
  modified_base 22: mod_base = OTHER; note = 5-methyl cytosine
ctactctnttatccanccacaca

SEQ ID NO: 5394 - DNA, 25 bp, synthetic construct
  source 1..25: mol_type = other DNA
  modified_base 1..25: mod_base = OTHER; note = 2'-O-(2-methoxyethyl) nucleotide phosphorothioate
  modified_base 9: mod_base = OTHER; note = A nucleoside-replacement group characterized by the lack of a nucleotide base
  modified_base 19: mod_base = OTHER; note = A nucleoside-replacement group characterized by the lack of a nucleotide base
  modified_base 3: mod_base = OTHER; note = 5-methyl cytosine
  modified_base 6: mod_base = OTHER; note = 5-methyl cytosine
  modified_base 8: mod_base = OTHER; note = 5-methyl cytosine
  modified_base 15..16: mod_base = OTHER; note = 5-methyl cytosine
  modified_base 20: mod_base = OTHER; note = 5-methyl cytosine
  modified_base 22: mod_base = OTHER; note = 5-methyl cytosine
  modified_base 24: mod_base = OTHER; note = 5-methyl cytosine
atctactcntttatccatncacaca

SEQ ID NO: 5395 - DNA, 23 bp, synthetic construct
  source 1..23: mol_type = other DNA
  modified_base 1..23: mod_base = OTHER; note = 2'-O-(2-methoxyethyl) nucleotide phosphorothioate
  modified_base 8: mod_base = OTHER; note = A nucleoside-replacement group characterized by the lack of a nucleotide base
  modified_base 16: mod_base = OTHER; note = A nucleoside-replacement group characterized by the lack of a nucleotide base
  modified_base 1: mod_base = OTHER; note = 5-methyl cytosine
  modified_base 5: mod_base = OTHER; note = 5-methyl cytosine
  modified_base 13: mod_base = OTHER; note = 5-methyl cytosine
  modified_base 17: mod_base = OTHER; note = 5-methyl cytosine
  modified_base 19: mod_base = OTHER; note = 5-methyl cytosine
  modified_base 21: mod_base = OTHER; note = 5-methyl cytosine
ctttcagnaattcaancacacat

SEQ ID NO: 5396 - DNA, 23 bp, synthetic construct
  source 1..23: mol_type = other DNA
  modified_base 1..23: mod_base = OTHER; note = 2'-O-(2-methoxyethyl) nucleotide phosphorothioate
  modified_base 7: mod_base = OTHER; note = 5-methyl cytosine
  modified_base 18: mod_base = OTHER; note = 5-methyl cytosine
aagtgtcatggagagtgcaaggg

SEQ ID NO: 5397 - DNA, 23 bp, synthetic construct
  source 1..23: mol_type = other DNA
  modified_base 1..23: mod_base = OTHER; note = 2'-O-(2-methoxyethyl) nucleotide phosphorothioate
  modified_base 1: mod_base = OTHER; note = 5-methyl cytosine
  modified_base 3: mod_base = OTHER; note = 5-methyl cytosine
  modified_base 6..7: mod_base = OTHER; note = 5-methyl cytosine
  modified_base 10..11: mod_base = OTHER; note = 5-methyl cytosine
  modified_base 14..15: mod_base = OTHER; note = 5-methyl cytosine
  modified_base 18..19: mod_base = OTHER; note = 5-methyl cytosine
  modified_base 23: mod_base = OTHER; note = 5-methyl cytosine
cacatccatccatccatccattc

SEQ ID NO: 5398 - DNA, 25 bp, synthetic construct
  source 1..25: mol_type = other DNA
  modified_base 1..25: mod_base = OTHER; note = 2'-O-(2-methoxyethyl) nucleotide phosphorothioate
  modified_base 1: mod_base = OTHER; note = 5-methyl cytosine
  modified_base 5..6: mod_base = OTHER; note = 5-methyl cytosine
  modified_base 20: mod_base = OTHER; note = 5-methyl cytosine
caatcctgagtggttagggctggaa

SEQ ID NO: 5399 - DNA, 25 bp, synthetic construct
  source 1..25: mol_type = other DNA
  modified_base 1..25: mod_base = OTHER; note = 2'-O-(2-methoxyethyl) nucleotide phosphorothioate
  modified_base 1: mod_base = OTHER; note = 5-methyl cytosine
  modified_base 5: mod_base = OTHER; note = 5-methyl cytosine
  modified_base 7: mod_base = OTHER; note = 5-methyl cytosine
  modified_base 11: mod_base = OTHER; note = 5-methyl cytosine
  modified_base 14..16: mod_base = OTHER; note = 5-methyl cytosine
  modified_base 20..21: mod_base = OTHER; note = 5-methyl cytosine
cagacacaaacggcccaatcctgag

SEQ ID NO: 5400 - DNA, 23 bp, synthetic construct
  source 1..23: mol_type = other DNA
  modified_base 1..23: mod_base = OTHER; note = 2'-O-(2-methoxyethyl) nucleotide phosphorothioate
  modified_base 1: mod_base = OTHER; note = 5-methyl cytosine
  modified_base 8..9: mod_base = OTHER; note = 5-methyl cytosine
  modified_base 12..13: mod_base = OTHER; note = 5-methyl cytosine
  modified_base 15: mod_base = OTHER; note = 5-methyl cytosine
  modified_base 17: mod_base = OTHER; note = 5-methyl cytosine
  modified_base 19..21: mod_base = OTHER; note = 5-methyl cytosine
  modified_base 23: mod_base = OTHER; note = 5-methyl cytosine
cttttatccatccacacacccac

SEQ ID NO: 5401 - DNA, 23 bp, synthetic construct
  source 1..23: mol_type = other DNA
  modified_base 1..23: mod_base = OTHER; note = 2'-O-(2-methoxyethyl) nucleotide phosphorothioate
  modified_base 2: mod_base = OTHER; note = 5-methyl cytosine
  modified_base 9..10: mod_base = OTHER; note = 5-methyl cytosine
  modified_base 13..14: mod_base = OTHER; note = 5-methyl cytosine
  modified_base 16: mod_base = OTHER; note = 5-methyl cytosine
  modified_base 18: mod_base = OTHER; note = 5-methyl cytosine
  modified_base 20..22: mod_base = OTHER; note = 5-methyl cytosine
tcttttatccatccacacaccca

SEQ ID NO: 5402 - DNA, 23 bp, synthetic construct
  source 1..23: mol_type = other DNA
  modified_base 1..23: mod_base = OTHER; note = 2'-O-(2-methoxyethyl) nucleotide phosphorothioate
  modified_base 8: mod_base = OTHER; note = A nucleoside-replacement group characterized by the lack of a nucleotide base
  modified_base 16: mod_base = OTHER; note = A nucleoside-replacement group characterized by the lack of a nucleotide base
  modified_base 1: mod_base = OTHER; note = 5-methyl cytosine
  modified_base 3: mod_base = OTHER; note = 5-methyl cytosine
  modified_base 10..11: mod_base = OTHER; note = 5-methyl cytosine
  modified_base 14..15: mod_base = OTHER; note = 5-methyl cytosine
  modified_base 17: mod_base = OTHER; note = 5-methyl cytosine
  modified_base 19: mod_base = OTHER; note = 5-methyl cytosine
  modified_base 21..23: mod_base = OTHER; note = 5-methyl cytosine
ctcttttntccatccncacaccc

SEQ ID NO: 5403 - DNA, 23 bp, synthetic construct
  source 1..23: mol_type = other DNA
  modified_base 1..23: mod_base = OTHER; note = 2'-O-(2-methoxyethyl) nucleotide phosphorothioate
  modified_base 4: mod_base = OTHER; note = 5-methyl cytosine
  modified_base 8: mod_base = OTHER; note = 5-methyl cytosine
gggcaggcaggaatggtgagtgg

SEQ ID NO: 5404 - DNA, 25 bp, synthetic construct
  source 1..25: mol_type = other DNA
  modified_base 1..25: mod_base = OTHER; note = 2'-O-(2-methoxyethyl) nucleotide phosphorothioate
  modified_base 9: mod_base = OTHER; note = A nucleoside-replacement group characterized by the lack of a nucleotide base
  modified_base 19: mod_base = OTHER; note = A nucleoside-replacement group characterized by the lack of a nucleotide base
  modified_base 2..3: mod_base = OTHER; note = 5-methyl cytosine
  modified_base 5..6: mod_base = OTHER; note = 5-methyl cytosine
  modified_base 10: mod_base = OTHER; note = 5-methyl cytosine
  modified_base 12: mod_base = OTHER; note = 5-methyl cytosine
  modified_base 14: mod_base = OTHER; note = 5-methyl cytosine
  modified_base 16: mod_base = OTHER; note = 5-methyl cytosine
  modified_base 20: mod_base = OTHER; note = 5-methyl cytosine
  modified_base 23..24: mod_base = OTHER; note = 5-methyl cytosine
tccaccagncactcacaancatcca

SEQ ID NO: 5405 - DNA, 25 bp, synthetic construct
  source 1..25: mol_type = other DNA
  modified_base 1..25: mod_base = OTHER; note = 2'-O-(2-methoxyethyl) nucleotide phosphorothioate
  modified_base 1: mod_base = OTHER; note = 5-methyl cytosine
  modified_base 3..5: mod_base = OTHER; note = 5-methyl cytosine
  modified_base 7..9: mod_base = OTHER; note = 5-methyl cytosine
  modified_base 12: mod_base = OTHER; note = 5-methyl cytosine
  modified_base 16: mod_base = OTHER; note = 5-methyl cytosine
  modified_base 19..22: mod_base = OTHER; note = 5-methyl cytosine
cacccacccatctaactaccccaaa

SEQ ID NO: 5406 - DNA, 23 bp, synthetic construct
  source 1..23: mol_type = other DNA
  modified_base 1..23: mod_base = OTHER; note = 2'-O-(2-methoxyethyl) nucleotide phosphorothioate
  modified_base 3: mod_base = OTHER; note = 5-methyl cytosine
  modified_base 7: mod_base = OTHER; note = 5-methyl cytosine
ggcaggcaggaatggtgagtgga

SEQ ID NO: 5407 - DNA, 23 bp, synthetic construct
  source 1..23: mol_type = other DNA
  modified_base 1..23: mod_base = OTHER; note = 2'-O-(2-methoxyethyl) nucleotide phosphorothioate
  modified_base 8: mod_base = OTHER; note = A nucleoside-replacement group characterized by the lack of a nucleotide base
  modified_base 16: mod_base = OTHER; note = A nucleoside-replacement group characterized by the lack of a nucleotide base
  modified_base 2: mod_base = OTHER; note = 5-methyl cytosine
  modified_base 9..10: mod_base = OTHER; note = 5-methyl cytosine
  modified_base 13..14: mod_base = OTHER; note = 5-methyl cytosine
  modified_base 18: mod_base = OTHER; note = 5-methyl cytosine
  modified_base 20..22: mod_base = OTHER; note = 5-methyl cytosine
tcttttanccatccanacaccca

SEQ ID NO: 5408 - DNA, 23 bp, synthetic construct
  source 1..23: mol_type = other DNA
  modified_base 1..23: mod_base = OTHER; note = 2'-O-(2-methoxyethyl) nucleotide phosphorothioate
  modified_base 1: mod_base = OTHER; note = 5-methyl cytosine
  modified_base 3..5: mod_base = OTHER; note = 5-methyl cytosine
  modified_base 7..9: mod_base = OTHER; note = 5-methyl cytosine
  modified_base 12: mod_base = OTHER; note = 5-methyl cytosine
  modified_base 16: mod_base = OTHER; note = 5-methyl cytosine
  modified_base 19..22: mod_base = OTHER; note = 5-methyl cytosine
cacccacccatctaactacccca

SEQ ID NO: 5409 - DNA, 23 bp, synthetic construct
  source 1..23: mol_type = other DNA
  modified_base 1..23: mod_base = OTHER; note = 2'-O-(2-methoxyethyl) nucleotide phosphorothioate
  modified_base 8: mod_base = OTHER; note = A nucleoside-replacement group characterized by the lack of a nucleotide base
  modified_base 16: mod_base = OTHER; note = A nucleoside-replacement group characterized by the lack of a nucleotide base
  modified_base 19: mod_base = OTHER; note = 5-methyl cytosine
aaagtgtnatggagantgcaagg

SEQ ID NO: 5410 - DNA, 23 bp, synthetic construct
  source 1..23: mol_type = other DNA
  modified_base 1..23: mod_base = OTHER; note = 2'-O-(2-methoxyethyl) nucleotide phosphorothioate
  modified_base 8: mod_base = OTHER; note = A nucleoside-replacement group characterized by the lack of a nucleotide base
  modified_base 16: mod_base = OTHER; note = A nucleoside-replacement group characterized by the lack of a nucleotide base
  modified_base 3: mod_base = OTHER; note = 5-methyl cytosine
  modified_base 11: mod_base = OTHER; note = 5-methyl cytosine
  modified_base 14..15: mod_base = OTHER; note = 5-methyl cytosine
  modified_base 17: mod_base = OTHER; note = 5-methyl cytosine
  modified_base 19: mod_base = OTHER; note = 5-methyl cytosine
  modified_base 22..23: mod_base = OTHER; note = 5-methyl cytosine
tgcaatanttcaaccncacatcc

SEQ ID NO: 5411 - DNA, 25 bp, synthetic construct
  source 1..25: mol_type = other DNA
  modified_base 1..25: mod_base = OTHER; note = 2'-O-(2-methoxyethyl) nucleotide phosphorothioate
  modified_base 9: mod_base = OTHER; note = A nucleoside-replacement group characterized by the lack of a nucleotide base
  modified_base 19: mod_base = OTHER; note = A nucleoside-replacement group characterized by the lack of a nucleotide base
  modified_base 4: mod_base = OTHER; note = 5-methyl cytosine
  modified_base 8: mod_base = OTHER; note = 5-methyl cytosine
gggcaggcnggaatggtgngtggaa

SEQ ID NO: 5412 - DNA, 25 bp, synthetic construct
  source 1..25: mol_type = other DNA
  modified_base 1..25: mod_base = OTHER; note = 2'-O-(2-methoxyethyl) nucleotide phosphorothioate
  modified_base 4: mod_base = OTHER; note = 5-methyl cytosine
  modified_base 8: mod_base = OTHER; note = 5-methyl cytosine
gggcaggcaggaatggtgagtggaa

SEQ ID NO: 5413 - DNA, 23 bp, synthetic construct
  source 1..23: mol_type = other DNA
  modified_base 1..23: mod_base = OTHER; note = 2'-O-(2-methoxyethyl) nucleotide phosphorothioate
  modified_base 8: mod_base = OTHER; note = A nucleoside-replacement group characterized by the lack of a nucleotide base
  modified_base 16: mod_base = OTHER; note = A nucleoside-replacement group characterized by the lack of a nucleotide base
  modified_base 3: mod_base = OTHER; note = 5-methyl cytosine
  modified_base 7: mod_base = OTHER; note = 5-methyl cytosine
ggcaggcnggaatggngagtgga

SEQ ID NO: 5414 - DNA, 25 bp, synthetic construct
  source 1..25: mol_type = other DNA
  modified_base 1..25: mod_base = OTHER; note = 2'-O-(2-methoxyethyl) nucleotide phosphorothioate
  modified_base 7: mod_base = OTHER; note = A nucleoside-replacement group characterized by the lack of a nucleotide base
  modified_base 19: mod_base = OTHER; note = A nucleoside-replacement group characterized by the lack of a nucleotide base
  modified_base 1: mod_base = OTHER; note = 5-methyl cytosine
  modified_base 3: mod_base = OTHER; note = 5-methyl cytosine
  modified_base 10..11: mod_base = OTHER; note = 5-methyl cytosine
  modified_base 14..15: mod_base = OTHER; note = 5-methyl cytosine
  modified_base 17: mod_base = OTHER; note = 5-methyl cytosine
  modified_base 21..23: mod_base = OTHER; note = 5-methyl cytosine
  modified_base 25: mod_base = OTHER; note = 5-methyl cytosine
ctctttnatccatccacanacccac

SEQ ID NO: 5415 - DNA, 23 bp, synthetic construct
  source 1..23: mol_type = other DNA
  modified_base 1..23: mod_base = OTHER; note = 2'-O-(2-methoxyethyl) nucleotide phosphorothioate
  modified_base 8: mod_base = OTHER; note = 5-methyl cytosine
  modified_base 19: mod_base = OTHER; note = 5-methyl cytosine
aaagtgtcatggagagtgcaagg

SEQ ID NO: 5416 - DNA, 23 bp, synthetic construct
  source 1..23: mol_type = other DNA
  modified_base 1..23: mod_base = OTHER; note = 2'-O-(2-methoxyethyl) nucleotide phosphorothioate
  modified_base 8: mod_base = OTHER; note = A nucleoside-replacement group characterized by the lack of a nucleotide base
  modified_base 16: mod_base = OTHER; note = A nucleoside-replacement group characterized by the lack of a nucleotide base
  modified_base 1: mod_base = OTHER; note = 5-methyl cytosine
  modified_base 9: mod_base = OTHER; note = 5-methyl cytosine
  modified_base 12..13: mod_base = OTHER; note = 5-methyl cytosine
  modified_base 15: mod_base = OTHER; note = 5-methyl cytosine
  modified_base 17: mod_base = OTHER; note = 5-methyl cytosine
  modified_base 20..21: mod_base = OTHER; note = 5-methyl cytosine
cagtaatncaaccacncatccat

SEQ ID NO: 5417 - DNA, 25 bp, synthetic construct
  source 1..25: mol_type = other DNA
  modified_base 1..25: mod_base = OTHER; note = 2'-O-(2-methoxyethyl) nucleotide phosphorothioate
  modified_base 9: mod_base = OTHER; note = A nucleoside-replacement group characterized by the lack of a nucleotide base
  modified_base 19: mod_base = OTHER; note = A nucleoside-replacement group characterized by the lack of a nucleotide base
  modified_base 1: mod_base = OTHER; note = 5-methyl cytosine
  modified_base 3: mod_base = OTHER; note = 5-methyl cytosine
  modified_base 10..11: mod_base = OTHER; note = 5-methyl cytosine
  modified_base 14..15: mod_base = OTHER; note = 5-methyl cytosine
  modified_base 17: mod_base = OTHER; note = 5-methyl cytosine
  modified_base 21..23: mod_base = OTHER; note = 5-methyl cytosine
  modified_base 25: mod_base = OTHER; note = 5-methyl cytosine
ctcttttanccatccacanacccac

SEQ ID NO: 5418 - DNA, 23 bp, synthetic construct
  source 1..23: mol_type = other DNA
  modified_base 1..23: mod_base = OTHER; note = 2'-O-(2-methoxyethyl) nucleotide phosphorothioate
  modified_base 1: mod_base = OTHER; note = 5-methyl cytosine
  modified_base 4: mod_base = OTHER; note = 5-methyl cytosine
  modified_base 6: mod_base = OTHER; note = 5-methyl cytosine
  modified_base 13..14: mod_base = OTHER; note = 5-methyl cytosine
  modified_base 17..18: mod_base = OTHER; note = 5-methyl cytosine
  modified_base 20: mod_base = OTHER; note = 5-methyl cytosine
  modified_base 22: mod_base = OTHER; note = 5-methyl cytosine
ctactcttttatccatccacaca

SEQ ID NO: 5419 - DNA, 25 bp, synthetic construct
  source 1..25: mol_type = other DNA
  modified_base 1..25: mod_base = OTHER; note = 2'-O-(2-methoxyethyl) nucleotide phosphorothioate
  modified_base 2..3: mod_base = OTHER; note = 5-methyl cytosine
  modified_base 7: mod_base = OTHER; note = 5-methyl cytosine
  modified_base 15: mod_base = OTHER; note = 5-methyl cytosine
  modified_base 18..19: mod_base = OTHER; note = 5-methyl cytosine
  modified_base 21: mod_base = OTHER; note = 5-methyl cytosine
  modified_base 23: mod_base = OTHER; note = 5-methyl cytosine
acctttcagtaattcaaccacacat

SEQ ID NO: 5420 - DNA, 23 bp, synthetic construct
  source 1..23: mol_type = other DNA
  modified_base 1..23: mod_base = OTHER; note = 2'-O-(2-methoxyethyl) nucleotide phosphorothioate
  modified_base 9: mod_base = OTHER; note = 5-methyl cytosine
  modified_base 20: mod_base = OTHER; note = 5-methyl cytosine
gaaagtgtcatggagagtgcaag

SEQ ID NO: 5421 - DNA, 23 bp, synthetic construct
  source 1..23: mol_type = other DNA
  modified_base 1..23: mod_base = OTHER; note = 2'-O-(2-methoxyethyl) nucleotide phosphorothioate
  modified_base 8: mod_base = OTHER; note = A nucleoside-replacement group characterized by the lack of a nucleotide base
  modified_base 16: mod_base = OTHER; note = A nucleoside-replacement group characterized by the lack of a nucleotide base
  modified_base 1: mod_base = OTHER; note = 5-methyl cytosine
  modified_base 9: mod_base = OTHER; note = 5-methyl cytosine
  modified_base 12..13: mod_base = OTHER; note = 5-methyl cytosine
  modified_base 15: mod_base = OTHER; note = 5-methyl cytosine
  modified_base 17: mod_base = OTHER; note = 5-methyl cytosine
  modified_base 19..21: mod_base = OTHER; note = 5-methyl cytosine
  modified_base 23: mod_base = OTHER; note = 5-methyl cytosine
cttttatncatccacncacccac

SEQ ID NO: 5422 - DNA, 25 bp, synthetic construct
  source 1..25: mol_type = other DNA
  modified_base 1..25: mod_base = OTHER; note = 2'-O-(2-methoxyethyl) nucleotide phosphorothioate
  modified_base 9: mod_base = OTHER; note = A nucleoside-replacement group characterized by the lack of a nucleotide base
  modified_base 19: mod_base = OTHER; note = A nucleoside-replacement group characterized by the lack of a nucleotide base
  modified_base 2..3: mod_base = OTHER; note = 5-methyl cytosine
  modified_base 7: mod_base = OTHER; note = 5-methyl cytosine
  modified_base 15: mod_base = OTHER; note = 5-methyl cytosine
  modified_base 18: mod_base = OTHER; note = 5-methyl cytosine
  modified_base 21: mod_base = OTHER; note = 5-methyl cytosine
  modified_base 23: mod_base = OTHER; note = 5-methyl cytosine
acctttcantaattcaacnacacat

SEQ ID NO: 5423 - DNA, 23 bp, synthetic construct
  source 1..23: mol_type = other DNA
  modified_base 1..23: mod_base = OTHER; note = 2'-O-(2-methoxyethyl) nucleotide phosphorothioate
  modified_base 8: mod_base = OTHER; note = A nucleoside-replacement group characterized by the lack of a nucleotide base
  modified_base 16: mod_base = OTHER; note = A nucleoside-replacement group characterized by the lack of a nucleotide base
  modified_base 2: mod_base = OTHER; note = 5-methyl cytosine
  modified_base 4: mod_base = OTHER; note = 5-methyl cytosine
  modified_base 11..13: mod_base = OTHER; note = 5-methyl cytosine
  modified_base 17..18: mod_base = OTHER; note = 5-methyl cytosine
acacaaanggcccaancctgagt

SEQ ID NO: 5424 - DNA, 23 bp, synthetic construct
  source 1..23: mol_type = other DNA
  modified_base 1..23: mod_base = OTHER; note = 2'-O-(2-methoxyethyl) nucleotide phosphorothioate
  modified_base 8: mod_base = OTHER; note = A nucleoside-replacement group characterized by the lack of a nucleotide base
  modified_base 16: mod_base = OTHER; note = A nucleoside-replacement group characterized by the lack of a nucleotide base
  modified_base 1: mod_base = OTHER; note = 5-methyl cytosine
  modified_base 3..5: mod_base = OTHER; note = 5-methyl cytosine
  modified_base 7: mod_base = OTHER; note = 5-methyl cytosine
  modified_base 9: mod_base = OTHER; note = 5-methyl cytosine
  modified_base 12: mod_base = OTHER; note = 5-methyl cytosine
  modified_base 19..22: mod_base = OTHER; note = 5-methyl cytosine
cacccacncatctaantacccca

SEQ ID NO: 5425 - DNA, 23 bp, synthetic construct
  source 1..23: mol_type = other DNA
  modified_base 1..23: mod_base = OTHER; note = 2'-O-(2-methoxyethyl) nucleotide phosphorothioate
  modified_base 8: mod_base = OTHER; note = A nucleoside-replacement group characterized by the lack of a nucleotide base
  modified_base 16: mod_base = OTHER; note = A nucleoside-replacement group characterized by the lack of a nucleotide base
  modified_base 11..12: mod_base = OTHER; note = 5-methyl cytosine
  modified_base 14: mod_base = OTHER; note = 5-methyl cytosine
  modified_base 19..20: mod_base = OTHER; note = 5-methyl cytosine
  modified_base 23: mod_base = OTHER; note = 5-methyl cytosine
agtaattnaaccacanatccatc

SEQ ID NO: 5426 - DNA, 23 bp, synthetic construct
  source 1..23: mol_type = other DNA
  modified_base 1..23: mod_base = OTHER; note = 2'-O-(2-methoxyethyl) nucleotide phosphorothioate
  modified_base 8: mod_base = OTHER; note = A nucleoside-replacement group characterized by the lack of a nucleotide base
  modified_base 16: mod_base = OTHER; note = A nucleoside-replacement group characterized by the lack of a nucleotide base
  modified_base 7: mod_base = OTHER; note = 5-methyl cytosine
  modified_base 18: mod_base = OTHER; note = 5-methyl cytosine
aagtgtcntggagagngcaaggg

SEQ ID NO: 5427 - DNA, 23 bp, synthetic construct
  source 1..23: mol_type = other DNA
  modified_base 1..23: mod_base = OTHER; note = 2'-O-(2-methoxyethyl) nucleotide phosphorothioate
  modified_base 2: mod_base = OTHER; note = 5-methyl cytosine
  modified_base 4: mod_base = OTHER; note = 5-methyl cytosine
  modified_base 8: mod_base = OTHER; note = 5-methyl cytosine
  modified_base 11..13: mod_base = OTHER; note = 5-methyl cytosine
  modified_base 17..18: mod_base = OTHER; note = 5-methyl cytosine
acacaaacggcccaatcctgagt

SEQ ID NO: 5428 - DNA, 23 bp, synthetic construct
  source 1..23: mol_type = other DNA
  modified_base 1..23: mod_base = OTHER; note = 2'-O-(2-methoxyethyl) nucleotide phosphorothioate
  modified_base 3: mod_base = OTHER; note = 5-methyl cytosine
  modified_base 11: mod_base = OTHER; note = 5-methyl cytosine
  modified_base 14..15: mod_base = OTHER; note = 5-methyl cytosine
  modified_base 17: mod_base = OTHER; note = 5-methyl cytosine
  modified_base 19: mod_base = OTHER; note = 5-methyl cytosine
  modified_base 22..23: mod_base = OTHER; note = 5-methyl cytosine
tgcaatagttcaaccacacatcc

SEQ ID NO: 5429 - DNA, 23 bp, synthetic construct
  source 1..23: mol_type = other DNA
  modified_base 1..23: mod_base = OTHER; note = 2'-O-(2-methoxyethyl) nucleotide phosphorothioate
  modified_base 1: mod_base = OTHER; note = 5-methyl cytosine
  modified_base 5: mod_base = OTHER; note = 5-methyl cytosine
  modified_base 13: mod_base = OTHER; note = 5-methyl cytosine
  modified_base 16..17: mod_base = OTHER; note = 5-methyl cytosine
  modified_base 19: mod_base = OTHER; note = 5-methyl cytosine
  modified_base 21: mod_base = OTHER; note = 5-methyl cytosine
ctttcagtaattcaaccacacat

SEQ ID NO: 5430 - DNA, 25 bp, synthetic construct
  source 1..25: mol_type = other DNA
  modified_base 1..25: mod_base = OTHER; note = 2'-O-(2-methoxyethyl) nucleotide phosphorothioate
  modified_base 2: mod_base = OTHER; note = 5-methyl cytosine
  modified_base 4: mod_base = OTHER; note = 5-methyl cytosine
  modified_base 8: mod_base = OTHER; note = 5-methyl cytosine
  modified_base 11..13: mod_base = OTHER; note = 5-methyl cytosine
  modified_base 17..18: mod_base = OTHER; note = 5-methyl cytosine
acacaaacggcccaatcctgagtgg

SEQ ID NO: 5431 - DNA, 25 bp, synthetic construct
  source 1..25: mol_type = other DNA
  modified_base 1..25: mod_base = OTHER; note = 2'-O-(2-methoxyethyl) nucleotide phosphorothioate
  modified_base 1..2: mod_base = OTHER; note = 5-methyl cytosine
  modified_base 16: mod_base = OTHER; note = 5-methyl cytosine
cctgagtggttagggctggaataga

SEQ ID NO: 5432 - DNA, 23 bp, synthetic construct
  source 1..23: mol_type = other DNA
  modified_base 1..23: mod_base = OTHER; note = 2'-O-(2-methoxyethyl) nucleotide phosphorothioate
  modified_base 1..2: mod_base = OTHER; note = 5-methyl cytosine
  modified_base 6: mod_base = OTHER; note = 5-methyl cytosine
  modified_base 14: mod_base = OTHER; note = 5-methyl cytosine
  modified_base 17..18: mod_base = OTHER; note = 5-methyl cytosine
  modified_base 20: mod_base = OTHER; note = 5-methyl cytosine
  modified_base 22: mod_base = OTHER; note = 5-methyl cytosine
cctttcagtaattcaaccacaca

SEQ ID NO: 5433 - DNA, 23 bp, synthetic construct
  source 1..23: mol_type = other DNA
  modified_base 1..23: mod_base = OTHER; note = 2'-O-(2-methoxyethyl) nucleotide phosphorothioate
  modified_base 1: mod_base = OTHER; note = 5-methyl cytosine
  modified_base 3: mod_base = OTHER; note = 5-methyl cytosine
  modified_base 7: mod_base = OTHER; note = 5-methyl cytosine
  modified_base 10..12: mod_base = OTHER; note = 5-methyl cytosine
  modified_base 16..17: mod_base = OTHER; note = 5-methyl cytosine
cacaaacggcccaatcctgagtg

SEQ ID NO: 5434 - DNA, 23 bp, synthetic construct
  source 1..23: mol_type = other DNA
  modified_base 1..23: mod_base = OTHER; note = 2'-O-(2-methoxyethyl) nucleotide phosphorothioate
  modified_base 2..4: mod_base = OTHER; note = 5-methyl cytosine
  modified_base 6..8: mod_base = OTHER; note = 5-methyl cytosine
  modified_base 11: mod_base = OTHER; note = 5-methyl cytosine
  modified_base 15: mod_base = OTHER; note = 5-methyl cytosine
  modified_base 18..21: mod_base = OTHER; note = 5-methyl cytosine
acccacccatctaactaccccaa

SEQ ID NO: 5435 - DNA, 23 bp, synthetic construct
  source 1..23: mol_type = other DNA
  modified_base 1..23: mod_base = OTHER; note = 2'-O-(2-methoxyethyl) nucleotide phosphorothioate
  modified_base 8: mod_base = OTHER; note = A nucleoside-replacement group characterized by the lack of a nucleotide base
  modified_base 16: mod_base = OTHER; note = A nucleoside-replacement group characterized by the lack of a nucleotide base
  modified_base 2: mod_base = OTHER; note = 5-methyl cytosine
  modified_base 5: mod_base = OTHER; note = 5-methyl cytosine
  modified_base 7: mod_base = OTHER; note = 5-methyl cytosine
  modified_base 14..15: mod_base = OTHER; note = 5-methyl cytosine
  modified_base 18..19: mod_base = OTHER; note = 5-methyl cytosine
  modified_base 21: mod_base = OTHER; note = 5-methyl cytosine
  modified_base 23: mod_base = OTHER; note = 5-methyl cytosine
tctactcntttatccntccacac

SEQ ID NO: 5436 - DNA, 23 bp, synthetic construct
  source 1..23: mol_type = other DNA
  modified_base 1..23: mod_base = OTHER; note = 2'-O-(2-methoxyethyl) nucleotide phosphorothioate
  modified_base 8: mod_base = OTHER; note = A nucleoside-replacement group characterized by the lack of a nucleotide base
  modified_base 16: mod_base = OTHER; note = A nucleoside-replacement group characterized by the lack of a nucleotide base
  modified_base 1: mod_base = OTHER; note = 5-methyl cytosine
  modified_base 3: mod_base = OTHER; note = 5-methyl cytosine
  modified_base 7: mod_base = OTHER; note = 5-methyl cytosine
  modified_base 10..12: mod_base = OTHER; note = 5-methyl cytosine
  modified_base 17: mod_base = OTHER; note = 5-methyl cytosine
cacaaacngcccaatnctgagtg

SEQ ID NO: 5437 - DNA, 23 bp, synthetic construct
  source 1..23: mol_type = other DNA
  modified_base 1..23: mod_base = OTHER; note = 2'-O-(2-methoxyethyl) nucleotide phosphorothioate
  modified_base 8: mod_base = OTHER; note = A nucleoside-replacement group characterized by the lack of a nucleotide base
  modified_base 16: mod_base = OTHER; note = A nucleoside-replacement group characterized by the lack of a nucleotide base
  modified_base 2: mod_base = OTHER; note = 5-methyl cytosine
  modified_base 6: mod_base = OTHER; note = 5-methyl cytosine
  modified_base 9..11: mod_base = OTHER; note = 5-methyl cytosine
  modified_base 15: mod_base = OTHER; note = 5-methyl cytosine
acaaacgncccaatcntgagtgg

SEQ ID NO: 5438 - DNA, 25 bp, synthetic construct
  source 1..25: mol_type = other DNA
  modified_base 1..25: mod_base = OTHER; note = 2'-O-(2-methoxyethyl) nucleotide phosphorothioate
  modified_base 7: mod_base = OTHER; note = A nucleoside-replacement group characterized by the lack of a nucleotide base
  modified_base 19: mod_base = OTHER; note = A nucleoside-replacement group characterized by the lack of a nucleotide base
  modified_base 2..3: mod_base = OTHER; note = 5-methyl cytosine
  modified_base 5..6: mod_base = OTHER; note = 5-methyl cytosine
  modified_base 9..10: mod_base = OTHER; note = 5-methyl cytosine
  modified_base 12: mod_base = OTHER; note = 5-methyl cytosine
  modified_base 14: mod_base = OTHER; note = 5-methyl cytosine
  modified_base 16: mod_base = OTHER; note = 5-methyl cytosine
  modified_base 20: mod_base = OTHER; note = 5-methyl cytosine
  modified_base 23..24: mod_base = OTHER; note = 5-methyl cytosine
tccaccngccactcacaancatcca

SEQ ID NO: 5439 - DNA, 23 bp, synthetic construct
  source 1..23: mol_type = other DNA
  modified_base 1..23: mod_base = OTHER; note = 2'-O-(2-methoxyethyl) nucleotide phosphorothioate
  modified_base 1..3: mod_base = OTHER; note = 5-methyl cytosine
  modified_base 5..7: mod_base = OTHER; note = 5-methyl cytosine
  modified_base 10: mod_base = OTHER; note = 5-methyl cytosine
  modified_base 14: mod_base = OTHER; note = 5-methyl cytosine
  modified_base 17..20: mod_base = OTHER; note = 5-methyl cytosine
cccacccatctaactaccccaaa

SEQ ID NO: 5440 - DNA, 23 bp, synthetic construct
  source 1..23: mol_type = other DNA
  modified_base 1..23: mod_base = OTHER; note = 2'-O-(2-methoxyethyl) nucleotide phosphorothioate
  modified_base 8: mod_base = OTHER; note = A nucleoside-replacement group characterized by the lack of a nucleotide base
  modified_base 16: mod_base = OTHER; note = A nucleoside-replacement group characterized by the lack of a nucleotide base
  modified_base 4: mod_base = OTHER; note = 5-methyl cytosine
gggcaggnaggaatgntgagtgg

SEQ ID NO: 5441 - DNA, 25 bp, synthetic construct
  source 1..25: mol_type = other DNA
  modified_base 1..25: mod_base = OTHER; note = 2'-O-(2-methoxyethyl) nucleotide phosphorothioate
  modified_base 7: mod_base = OTHER; note = A nucleoside-replacement group characterized by the lack of a nucleotide base
  modified_base 19: mod_base = OTHER; note = A nucleoside-replacement group characterized by the lack of a nucleotide base
  modified_base 1: mod_base = OTHER; note = 5-methyl cytosine
  modified_base 5: mod_base = OTHER; note = 5-methyl cytosine
  modified_base 13: mod_base = OTHER; note = 5-methyl cytosine
  modified_base 16..17: mod_base = OTHER; note = 5-methyl cytosine
  modified_base 21: mod_base = OTHER; note = 5-methyl cytosine
  modified_base 24..25: mod_base = OTHER; note = 5-methyl cytosine
cttgcantagttcaaccanacatcc

SEQ ID NO: 5442 - DNA, 23 bp, synthetic construct
  source 1..23: mol_type = other DNA
  modified_base 1..23: mod_base = OTHER; note = 2'-O-(2-methoxyethyl) nucleotide phosphorothioate
  modified_base 8: mod_base = OTHER; note = A nucleoside-replacement group characterized by the lack of a nucleotide base
  modified_base 16: mod_base = OTHER; note = A nucleoside-replacement group characterized by the lack of a nucleotide base
  modified_base 3: mod_base = OTHER; note = 5-methyl cytosine
  modified_base 6: mod_base = OTHER; note = 5-methyl cytosine
  modified_base 15: mod_base = OTHER; note = 5-methyl cytosine
  modified_base 19..20: mod_base = OTHER; note = 5-methyl cytosine
  modified_base 22: mod_base = OTHER; note = 5-methyl cytosine
atctactnttttatcnatccaca

SEQ ID NO: 5443 - DNA, 25 bp, synthetic construct
  source 1..25: mol_type = other DNA
  modified_base 1..25: mod_base = OTHER; note = 2'-O-(2-methoxyethyl) nucleotide phosphorothioate
  modified_base 2: mod_base = OTHER; note = 5-methyl cytosine
  modified_base 5..7: mod_base = OTHER; note = 5-methyl cytosine
  modified_base 11..12: mod_base = OTHER; note = 5-methyl cytosine
acggcccaatcctgagtggttaggg

SEQ ID NO: 5444 - DNA, 23 bp, synthetic construct
  source 1..23: mol_type = other DNA
  modified_base 1..23: mod_base = OTHER; note = 2'-O-(2-methoxyethyl) nucleotide phosphorothioate
  modified_base 4..5: mod_base = OTHER; note = 5-methyl cytosine
  modified_base 7: mod_base = OTHER; note = 5-methyl cytosine
  modified_base 10: mod_base = OTHER; note = 5-methyl cytosine
  modified_base 16..17: mod_base = OTHER; note = 5-methyl cytosine
  modified_base 19..20: mod_base = OTHER; note = 5-methyl cytosine
  modified_base 23: mod_base = OTHER; note = 5-methyl cytosine
gatccgcaacttaatccacctac

SEQ ID NO: 5445 - DNA, 25 bp, synthetic construct
  source 1..25: mol_type = other DNA
  modified_base 1..25: mod_base = OTHER; note = 2'-O-(2-methoxyethyl) nucleotide phosphorothioate
  modified_base 7: mod_base = OTHER; note = A nucleoside-replacement group characterized by the lack of a nucleotide base
  modified_base 19: mod_base = OTHER; note = A nucleoside-replacement group characterized by the lack of a nucleotide base
  modified_base 9: mod_base = OTHER; note = 5-methyl cytosine
  modified_base 20: mod_base = OTHER; note = 5-methyl cytosine
gaaagtntcatggagagtncaaggg

SEQ ID NO: 5446 - DNA, 23 bp, synthetic construct
  source 1..23: mol_type = other DNA
  modified_base 1..23: mod_base = OTHER; note = 2'-O-(2-methoxyethyl) nucleotide phosphorothioate
  modified_base 3: mod_base = OTHER; note = 5-methyl cytosine
  modified_base 6: mod_base = OTHER; note = 5-methyl cytosine
  modified_base 8: mod_base = OTHER; note = 5-methyl cytosine
  modified_base 15..16: mod_base = OTHER; note = 5-methyl cytosine
  modified_base 19..20: mod_base = OTHER; note = 5-methyl cytosine
  modified_base 22: mod_base = OTHER; note = 5-methyl cytosine
atctactcttttatccatccaca

SEQ ID NO: 5447 - DNA, 23 bp, synthetic construct
  source 1..23: mol_type = other DNA
  modified_base 1..23: mod_base = OTHER; note = 2'-O-(2-methoxyethyl) nucleotide phosphorothioate
  modified_base 2: mod_base = OTHER; note = 5-methyl cytosine
  modified_base 6: mod_base = OTHER; note = 5-methyl cytosine
  modified_base 9..11: mod_base = OTHER; note = 5-methyl cytosine
  modified_base 15..16: mod_base = OTHER; note = 5-methyl cytosine
acaaacggcccaatcctgagtgg

SEQ ID NO: 5448 - DNA, 23 bp, synthetic construct
  source 1..23: mol_type = other DNA
  modified_base 1..23: mod_base = OTHER; note = 2'-O-(2-methoxyethyl) nucleotide phosphorothioate
  modified_base 2: mod_base = OTHER; note = 5-methyl cytosine
  modified_base 6: mod_base = OTHER; note = 5-methyl cytosine
gcaggcaggaatggtgagtggaa

SEQ ID NO: 5449 - DNA, 23 bp, synthetic construct
  source 1..23: mol_type = other DNA
  modified_base 1..23: mod_base = OTHER; note = 2'-O-(2-methoxyethyl) nucleotide phosphorothioate
  modified_base 8: mod_base = OTHER; note = A nucleoside-replacement group characterized by the lack of a nucleotide base
  modified_base 16: mod_base = OTHER; note = A nucleoside-replacement group characterized by the lack of a nucleotide base
  modified_base 2..3: mod_base = OTHER; note = 5-methyl cytosine
  modified_base 7: mod_base = OTHER; note = 5-methyl cytosine
  modified_base 15: mod_base = OTHER; note = 5-methyl cytosine
  modified_base 18..19: mod_base = OTHER; note = 5-methyl cytosine
  modified_base 21: mod_base = OTHER; note = 5-methyl cytosine
  modified_base 23: mod_base = OTHER; note = 5-methyl cytosine
acctttcngtaattcnaccacac

SEQ ID NO: 5450 - DNA, 25 bp, synthetic construct
  source 1..25: mol_type = other DNA
  modified_base 1..25: mod_base = OTHER; note = 2'-O-(2-methoxyethyl) nucleotide phosphorothioate
  modified_base 16: mod_base = OTHER; note = 5-methyl cytosine
  modified_base 21: mod_base = OTHER; note = 5-methyl cytosine
  modified_base 25: mod_base = OTHER; note = 5-methyl cytosine
aggtaaagggaatggcatggcgggc

SEQ ID NO: 5451 - DNA, 23 bp, synthetic construct
  source 1..23: mol_type = other DNA
  modified_base 1..23: mod_base = OTHER; note = 2'-O-(2-methoxyethyl) nucleotide phosphorothioate
  modified_base 2..3: mod_base = OTHER; note = 5-methyl cytosine
  modified_base 5: mod_base = OTHER; note = 5-methyl cytosine
  modified_base 8: mod_base = OTHER; note = 5-methyl cytosine
  modified_base 14..15: mod_base = OTHER; note = 5-methyl cytosine
  modified_base 17..18: mod_base = OTHER; note = 5-methyl cytosine
  modified_base 21..23: mod_base = OTHER; note = 5-methyl cytosine
tccgcaacttaatccacctaccc

SEQ ID NO: 5452 - DNA, 25 bp, synthetic construct
  source 1..25: mol_type = other DNA
  modified_base 1..25: mod_base = OTHER; note = 2'-O-(2-methoxyethyl) nucleotide phosphorothioate
  modified_base 9: mod_base = OTHER; note = 5-methyl cytosine
  modified_base 20: mod_base = OTHER; note = 5-methyl cytosine
gaaagtgtcatggagagtgcaaggg

SEQ ID NO: 5453 - DNA, 23 bp, synthetic construct
  source 1..23: mol_type = other DNA
  modified_base 1..23: mod_base = OTHER; note = 2'-O-(2-methoxyethyl) nucleotide phosphorothioate
  modified_base 8: mod_base = OTHER; note = A nucleoside-replacement group characterized by the lack of a nucleotide base
  modified_base 16: mod_base = OTHER; note = A nucleoside-replacement group characterized by the lack of a nucleotide base
  modified_base 1: mod_base = OTHER; note = 5-methyl cytosine
  modified_base 5: mod_base = OTHER; note = 5-methyl cytosine
  modified_base 13: mod_base = OTHER; note = 5-methyl cytosine
  modified_base 17: mod_base = OTHER; note = 5-methyl cytosine
  modified_base 19: mod_base = OTHER; note = 5-methyl cytosine
  modified_base 21: mod_base = OTHER; note = 5-methyl cytosine
cttgcaanagttcaancacacat

SEQ ID NO: 5454 - DNA, 23 bp, synthetic construct
  source 1..23: mol_type = other DNA
  modified_base 1..23: mod_base = OTHER; note = 2'-O-(2-methoxyethyl) nucleotide phosphorothioate
  modified_base 1: mod_base = OTHER; note = 5-methyl cytosine
  modified_base 5: mod_base = OTHER; note = 5-methyl cytosine
  modified_base 13: mod_base = OTHER; note = 5-methyl cytosine
  modified_base 16..17: mod_base = OTHER; note = 5-methyl cytosine
  modified_base 19: mod_base = OTHER; note = 5-methyl cytosine
  modified_base 21: mod_base = OTHER; note = 5-methyl cytosine
cttgcaatagttcaaccacacat

SEQ ID NO: 5455 - DNA, 23 bp, synthetic construct
  source 1..23: mol_type = other DNA
  modified_base 1..23: mod_base = OTHER; note = 2'-O-(2-methoxyethyl) nucleotide phosphorothioate
  modified_base 8: mod_base = OTHER; note = A nucleoside-replacement group characterized by the lack of a nucleotide base
  modified_base 16: mod_base = OTHER; note = A nucleoside-replacement group characterized by the lack of a nucleotide base
  modified_base 1..3: mod_base = OTHER; note = 5-methyl cytosine
  modified_base 5..7: mod_base = OTHER; note = 5-methyl cytosine
  modified_base 10: mod_base = OTHER; note = 5-methyl cytosine
  modified_base 14: mod_base = OTHER; note = 5-methyl cytosine
  modified_base 17..20: mod_base = OTHER; note = 5-methyl cytosine
cccacccntctaactnccccaaa

SEQ ID NO: 5456 - DNA, 25 bp, synthetic construct
  source 1..25: mol_type = other DNA
  modified_base 1..25: mod_base = OTHER; note = 2'-O-(2-methoxyethyl) nucleotide phosphorothioate
  modified_base 9: mod_base = OTHER; note = A nucleoside-replacement group characterized by the lack of a nucleotide base
  modified_base 19: mod_base = OTHER; note = A nucleoside-replacement group characterized by the lack of a nucleotide base
  modified_base 1: mod_base = OTHER; note = 5-methyl cytosine
  modified_base 12..13: mod_base = OTHER; note = 5-methyl cytosine
  modified_base 15: mod_base = OTHER; note = 5-methyl cytosine
  modified_base 17: mod_base = OTHER; note = 5-methyl cytosine
  modified_base 20..21: mod_base = OTHER; note = 5-methyl cytosine
  modified_base 24..25: mod_base = OTHER; note = 5-methyl cytosine
cagtaattnaaccacacanccatcc

SEQ ID NO: 5457 - DNA, 23 bp, synthetic construct
  source 1..23: mol_type = other DNA
  modified_base 1..23: mod_base = OTHER; note = 2'-O-(2-methoxyethyl) nucleotide phosphorothioate
  modified_base 4: mod_base = OTHER; note = 5-methyl cytosine
  modified_base 12: mod_base = OTHER; note = 5-methyl cytosine
  modified_base 15..16: mod_base = OTHER; note = 5-methyl cytosine
  modified_base 18: mod_base = OTHER; note = 5-methyl cytosine
  modified_base 20: mod_base = OTHER; note = 5-methyl cytosine
  modified_base 23: mod_base = OTHER; note = 5-methyl cytosine
ttgcaatagttcaaccacacatc

SEQ ID NO: 5458 - DNA, 23 bp, synthetic construct
  source 1..23: mol_type = other DNA
  modified_base 1..23: mod_base = OTHER; note = 2'-O-(2-methoxyethyl) nucleotide phosphorothioate
  modified_base 2..3: mod_base = OTHER; note = 5-methyl cytosine
  modified_base 7: mod_base = OTHER; note = 5-methyl cytosine
  modified_base 15: mod_base = OTHER; note = 5-methyl cytosine
  modified_base 18..19: mod_base = OTHER; note = 5-methyl cytosine
  modified_base 21: mod_base = OTHER; note = 5-methyl cytosine
  modified_base 23: mod_base = OTHER; note = 5-methyl cytosine
acctttcagtaattcaaccacac

SEQ ID NO: 5459 - DNA, 23 bp, synthetic construct
  source 1..23: mol_type = other DNA
  modified_base 1..23: mod_base = OTHER; note = 2'-O-(2-methoxyethyl) nucleotide phosphorothioate
  modified_base 8: mod_base = OTHER; note = A nucleoside-replacement group characterized by the lack of a nucleotide base
  modified_base 16: mod_base = OTHER; note = A nucleoside-replacement group characterized by the lack of a nucleotide base
  modified_base 7: mod_base = OTHER; note = 5-methyl cytosine
  modified_base 10..11: mod_base = OTHER; note = 5-methyl cytosine
  modified_base 13: mod_base = OTHER; note = 5-methyl cytosine
  modified_base 15: mod_base = OTHER; note = 5-methyl cytosine
  modified_base 18..19: mod_base = OTHER; note = 5-methyl cytosine
  modified_base 22..23: mod_base = OTHER; note = 5-methyl cytosine
gtaattcnaccacacntccatcc

SEQ ID NO: 5460 - DNA, 25 bp, synthetic construct
  source 1..25: mol_type = other DNA
  modified_base 1..25: mod_base = OTHER; note = 2'-O-(2-methoxyethyl) nucleotide phosphorothioate
  modified_base 12: mod_base = OTHER; note = 5-methyl cytosine
  modified_base 15..16: mod_base = OTHER; note = 5-methyl cytosine
  modified_base 23..24: mod_base = OTHER; note = 5-methyl cytosine
gtagtgagagtcaacctggaggcca

SEQ ID NO: 5461 - DNA, 23 bp, synthetic construct
  source 1..23: mol_type = other DNA
  modified_base 1..23: mod_base = OTHER; note = 2'-O-(2-methoxyethyl) nucleotide phosphorothioate
  modified_base 2: mod_base = OTHER; note = 5-methyl cytosine
  modified_base 5: mod_base = OTHER; note = 5-methyl cytosine
  modified_base 7: mod_base = OTHER; note = 5-methyl cytosine
  modified_base 14..15: mod_base = OTHER; note = 5-methyl cytosine
  modified_base 18..19: mod_base = OTHER; note = 5-methyl cytosine
  modified_base 21: mod_base = OTHER; note = 5-methyl cytosine
  modified_base 23: mod_base = OTHER; note = 5-methyl cytosine
tctactcttttatccatccacac

SEQ ID NO: 5462 - DNA, 25 bp, synthetic construct
  source 1..25: mol_type = other DNA
  modified_base 1..25: mod_base = OTHER; note = 2'-O-(2-methoxyethyl) nucleotide phosphorothioate
  modified_base 1: mod_base = OTHER; note = 5-methyl cytosine
  modified_base 3..4: mod_base = OTHER; note = 5-methyl cytosine
  modified_base 21: mod_base = OTHER; note = 5-methyl cytosine
caccatgggagagaaagtgtcatgg

SEQ ID NO: 5463 - DNA, 25 bp, synthetic construct
  source 1..25: mol_type = other DNA
  modified_base 1..25: mod_base = OTHER; note = 2'-O-(2-methoxyethyl) nucleotide phosphorothioate
  modified_base 14..15: mod_base = OTHER; note = 5-methyl cytosine
agggaggagttttccaggtaaaggg

SEQ ID NO: 5464 - DNA, 23 bp, synthetic construct
  source 1..23: mol_type = other DNA
  modified_base 1..23: mod_base = OTHER; note = 2'-O-(2-methoxyethyl) nucleotide phosphorothioate
  modified_base 8: mod_base = OTHER; note = A nucleoside-replacement group characterized by the lack of a nucleotide base
  modified_base 16: mod_base = OTHER; note = A nucleoside-replacement group characterized by the lack of a nucleotide base
  modified_base 2: mod_base = OTHER; note = 5-methyl cytosine
  modified_base 6: mod_base = OTHER; note = 5-methyl cytosine
gcaggcangaatggtnagtggaa

SEQ ID NO: 5465 - DNA, 23 bp, synthetic construct
  source 1..23: mol_type = other DNA
  modified_base 1..23: mod_base = OTHER; note = 2'-O-(2-methoxyethyl) nucleotide phosphorothioate
  modified_base 8: mod_base = OTHER; note = A nucleoside-replacement group characterized by the lack of a nucleotide base
  modified_base 16: mod_base = OTHER; note = A nucleoside-replacement group characterized by the lack of a nucleotide base
  modified_base 2..4: mod_base = OTHER; note = 5-methyl cytosine
  modified_base 6..7: mod_base = OTHER; note = 5-methyl cytosine
  modified_base 11: mod_base = OTHER; note = 5-methyl cytosine
  modified_base 15: mod_base = OTHER; note = 5-methyl cytosine
  modified_base 18..21: mod_base = OTHER; note = 5-methyl cytosine
acccaccnatctaacnaccccaa

SEQ ID NO: 5466 - DNA, 25 bp, synthetic construct
  source 1..25: mol_type = other DNA
  modified_base 1..25: mod_base = OTHER; note = 2'-O-(2-methoxyethyl) nucleotide phosphorothioate
  modified_base 7: mod_base = OTHER; note = A nucleoside-replacement group characterized by the lack of a nucleotide base
  modified_base 19: mod_base = OTHER; note = A nucleoside-replacement group characterized by the lack of a nucleotide base
  modified_base 2: mod_base = OTHER; note = 5-methyl cytosine
  modified_base 4: mod_base = OTHER; note = 5-methyl cytosine
  modified_base 8: mod_base = OTHER; note = 5-methyl cytosine
  modified_base 11..12: mod_base = OTHER; note = 5-methyl cytosine
  modified_base 15..16: mod_base = OTHER; note = 5-methyl cytosine
  modified_base 20: mod_base = OTHER; note = 5-methyl cytosine
  modified_base 24: mod_base = OTHER; note = 5-methyl cytosine
acacatncatccatccatncattca

SEQ ID NO: 5467 - DNA, 23 bp, synthetic construct
  source 1..23: mol_type = other DNA
  modified_base 1..23: mod_base = OTHER; note = 2'-O-(2-methoxyethyl) nucleotide phosphorothioate
  modified_base 8: mod_base = OTHER; note = A nucleoside-replacement group characterized by the lack of a nucleotide base
  modified_base 16: mod_base = OTHER; note = A nucleoside-replacement group characterized by the lack of a nucleotide base
  modified_base 4: mod_base = OTHER; note = 5-methyl cytosine
  modified_base 12: mod_base = OTHER; note = 5-methyl cytosine
  modified_base 15: mod_base = OTHER; note = 5-methyl cytosine
  modified_base 18: mod_base = OTHER; note = 5-methyl cytosine
  modified_base 20: mod_base = OTHER; note = 5-methyl cytosine
  modified_base 23: mod_base = OTHER; note = 5-methyl cytosine
ttgcaatngttcaacnacacatc

SEQ ID NO: 5468 - DNA, 25 bp, synthetic construct
  source 1..25: mol_type = other DNA
  modified_base 1..25: mod_base = OTHER; note = 2'-O-(2-methoxyethyl) nucleotide phosphorothioate
  modified_base 7: mod_base = OTHER; note = A nucleoside-replacement group characterized by the lack of a nucleotide base
  modified_base 19: mod_base = OTHER; note = A nucleoside-replacement group characterized by the lack of a nucleotide base
  modified_base 14..15: mod_base = OTHER; note = 5-methyl cytosine
agggagnagttttccaggnaaaggg

SEQ ID NO: 5469 - DNA, 23 bp, synthetic construct
  source 1..23: mol_type = other DNA
  modified_base 1..23: mod_base = OTHER; note = 2'-O-(2-methoxyethyl) nucleotide phosphorothioate
  modified_base 8: mod_base = OTHER; note = A nucleoside-replacement group characterized by the lack of a nucleotide base
  modified_base 16: mod_base = OTHER; note = A nucleoside-replacement group characterized by the lack of a nucleotide base
  modified_base 2: mod_base = OTHER; note = 5-methyl cytosine
  modified_base 5..6: mod_base = OTHER; note = 5-methyl cytosine
  modified_base 9..10: mod_base = OTHER; note = 5-methyl cytosine
  modified_base 13..14: mod_base = OTHER; note = 5-methyl cytosine
  modified_base 17..18: mod_base = OTHER; note = 5-methyl cytosine
  modified_base 22: mod_base = OTHER; note = 5-methyl cytosine
acatccanccatccanccattca

SEQ ID NO: 5470 - DNA, 25 bp, synthetic construct
  source 1..25: mol_type = other DNA
  modified_base 1..25: mod_base = OTHER; note = 2'-O-(2-methoxyethyl) nucleotide phosphorothioate
  modified_base 7: mod_base = OTHER; note = A nucleoside-replacement group characterized by the lack of a nucleotide base
  modified_base 19: mod_base = OTHER; note = A nucleoside-replacement group characterized by the lack of a nucleotide base
  modified_base 2..3: mod_base = OTHER; note = 5-methyl cytosine
  modified_base 15: mod_base = OTHER; note = 5-methyl cytosine
  modified_base 18: mod_base = OTHER; note = 5-methyl cytosine
  modified_base 21: mod_base = OTHER; note = 5-methyl cytosine
  modified_base 23: mod_base = OTHER; note = 5-methyl cytosine
acctttnagtaattcaacnacacat

SEQ ID NO: 5471 - DNA, 25 bp, synthetic construct
  source 1..25: mol_type = other DNA
  modified_base 1..25: mod_base = OTHER; note = 2'-O-(2-methoxyethyl) nucleotide phosphorothioate
  modified_base 9: mod_base = OTHER; note = A nucleoside-replacement group characterized by the lack of a nucleotide base
  modified_base 19: mod_base = OTHER; note = A nucleoside-replacement group characterized by the lack of a nucleotide base
  modified_base 20: mod_base = OTHER; note = 5-methyl cytosine
gaaagtgtnatggagagtncaaggg

SEQ ID NO: 5472 - DNA, 25 bp, synthetic construct
  source 1..25: mol_type = other DNA
  modified_base 1..25: mod_base = OTHER; note = 2'-O-(2-methoxyethyl) nucleotide phosphorothioate
  modified_base 9: mod_base = OTHER; note = A nucleoside-replacement group characterized by the lack of a nucleotide base
  modified_base 19: mod_base = OTHER; note = A nucleoside-replacement group characterized by the lack of a nucleotide base
  modified_base 14..15: mod_base = OTHER; note = 5-methyl cytosine
agggagganttttccaggnaaaggg

SEQ ID NO: 5473 - DNA, 25 bp, synthetic construct
  source 1..25: mol_type = other DNA
  modified_base 1..25: mod_base = OTHER; note = 2'-O-(2-methoxyethyl) nucleotide phosphorothioate
  modified_base 7: mod_base = OTHER; note = 5-methyl cytosine
  modified_base 10..11: mod_base = OTHER; note = 5-methyl cytosine
  modified_base 18..19: mod_base = OTHER; note = 5-methyl cytosine
gagagtcaacctggaggccaaggtg

SEQ ID NO: 5474 - DNA, 23 bp, synthetic construct
  source 1..23: mol_type = other DNA
  modified_base 1..23: mod_base = OTHER; note = 2'-O-(2-methoxyethyl) nucleotide phosphorothioate
  modified_base 4: mod_base = OTHER; note = 5-methyl cytosine
  modified_base 7..8: mod_base = OTHER; note = 5-methyl cytosine
  modified_base 10: mod_base = OTHER; note = 5-methyl cytosine
  modified_base 12: mod_base = OTHER; note = 5-methyl cytosine
  modified_base 15..16: mod_base = OTHER; note = 5-methyl cytosine
  modified_base 19..20: mod_base = OTHER; note = 5-methyl cytosine
gttcaaccacacatccttccatt

SEQ ID NO: 5475 - DNA, 25 bp, synthetic construct
  source 1..25: mol_type = other DNA
  modified_base 1..25: mod_base = OTHER; note = 2'-O-(2-methoxyethyl) nucleotide phosphorothioate
  modified_base 1: mod_base = OTHER; note = 5-methyl cytosine
  modified_base 5: mod_base = OTHER; note = 5-methyl cytosine
  modified_base 13: mod_base = OTHER; note = 5-methyl cytosine
  modified_base 16..17: mod_base = OTHER; note = 5-methyl cytosine
  modified_base 19: mod_base = OTHER; note = 5-methyl cytosine
  modified_base 21: mod_base = OTHER; note = 5-methyl cytosine
  modified_base 24..25: mod_base = OTHER; note = 5-methyl cytosine
cttgcaatagttcaaccacacatcc

SEQ ID NO: 5476 - DNA, 25 bp, synthetic construct
  source 1..25: mol_type = other DNA
  modified_base 1..25: mod_base = OTHER; note = 2'-O-(2-methoxyethyl) nucleotide phosphorothioate
  modified_base 3: mod_base = OTHER; note = 5-methyl cytosine
  modified_base 7..8: mod_base = OTHER; note = 5-methyl cytosine
  modified_base 10..11: mod_base = OTHER; note = 5-methyl cytosine
  modified_base 14..15: mod_base = OTHER; note = 5-methyl cytosine
  modified_base 17: mod_base = OTHER; note = 5-methyl cytosine
  modified_base 19: mod_base = OTHER; note = 5-methyl cytosine
  modified_base 21: mod_base = OTHER; note = 5-methyl cytosine
  modified_base 24..25: mod_base = OTHER; note = 5-methyl cytosine
gtctgtccaccagccactcacaacc

SEQ ID NO: 5477 - DNA, 23 bp, synthetic construct
  source 1..23: mol_type = other DNA
  modified_base 1..23: mod_base = OTHER; note = 2'-O-(2-methoxyethyl) nucleotide phosphorothioate
  modified_base 5: mod_base = OTHER; note = 5-methyl cytosine
  modified_base 8..9: mod_base = OTHER; note = 5-methyl cytosine
  modified_base 11: mod_base = OTHER; note = 5-methyl cytosine
  modified_base 13: mod_base = OTHER; note = 5-methyl cytosine
  modified_base 16..17: mod_base = OTHER; note = 5-methyl cytosine
  modified_base 20..21: mod_base = OTHER; note = 5-methyl cytosine
agttcaaccacacatccttccat

SEQ ID NO: 5478 - DNA, 25 bp, synthetic construct
  source 1..25: mol_type = other DNA
  modified_base 1..25: mod_base = OTHER; note = 2'-O-(2-methoxyethyl) nucleotide phosphorothioate
  modified_base 9: mod_base = OTHER; note = A nucleoside-replacement group characterized by the lack of a nucleotide base
  modified_base 19: mod_base = OTHER; note = A nucleoside-replacement group characterized by the lack of a nucleotide base
  modified_base 5: mod_base = OTHER; note = 5-methyl cytosine
  modified_base 8: mod_base = OTHER; note = 5-methyl cytosine
  modified_base 11: mod_base = OTHER; note = 5-methyl cytosine
  modified_base 13: mod_base = OTHER; note = 5-methyl cytosine
  modified_base 16..17: mod_base = OTHER; note = 5-methyl cytosine
  modified_base 20..21: mod_base = OTHER; note = 5-methyl cytosine
  modified_base 25: mod_base = OTHER; note = 5-methyl cytosine
agttcaacnacacatcctnccattc

SEQ ID NO: 5479 - DNA, 23 bp, synthetic construct
  source 1..23: mol_type = other DNA
  modified_base 1..23: mod_base = OTHER; note = 2'-O-(2-methoxyethyl) nucleotide phosphorothioate
  modified_base 8: mod_base = OTHER; note = A nucleoside-replacement group characterized by the lack of a nucleotide base
  modified_base 16: mod_base = OTHER; note = A nucleoside-replacement group characterized by the lack of a nucleotide base
  modified_base 2: mod_base = OTHER; note = 5-methyl cytosine
  modified_base 4: mod_base = OTHER; note = 5-methyl cytosine
  modified_base 7: mod_base = OTHER; note = 5-methyl cytosine
  modified_base 11..12: mod_base = OTHER; note = 5-methyl cytosine
  modified_base 15: mod_base = OTHER; note = 5-methyl cytosine
  modified_base 19..20: mod_base = OTHER; note = 5-methyl cytosine
acacatcnatccatcnatccatt

SEQ ID NO: 5480 - DNA, 23 bp, synthetic construct
  source 1..23: mol_type = other DNA
  modified_base 1..23: mod_base = OTHER; note = 2'-O-(2-methoxyethyl) nucleotide phosphorothioate
  modified_base 3: mod_base = OTHER; note = 5-methyl cytosine
  modified_base 6..7: mod_base = OTHER; note = 5-methyl cytosine
  modified_base 9: mod_base = OTHER; note = 5-methyl cytosine
  modified_base 11: mod_base = OTHER; note = 5-methyl cytosine
  modified_base 14..15: mod_base = OTHER; note = 5-methyl cytosine
  modified_base 18..19: mod_base = OTHER; note = 5-methyl cytosine
  modified_base 23: mod_base = OTHER; note = 5-methyl cytosine
ttcaaccacacatccttccattc

SEQ ID NO: 5481 - DNA, 23 bp, synthetic construct
  source 1..23: mol_type = other DNA
  modified_base 1..23: mod_base = OTHER; note = 2'-O-(2-methoxyethyl) nucleotide phosphorothioate
  modified_base 8: mod_base = OTHER; note = A nucleoside-replacement group characterized by the lack of a nucleotide base
  modified_base 16: mod_base = OTHER; note = A nucleoside-replacement group characterized by the lack of a nucleotide base
  modified_base 11..13: mod_base = OTHER; note = 5-methyl cytosine
  modified_base 19: mod_base = OTHER; note = 5-methyl cytosine
gaggaggngaccctgnatctgga

SEQ ID NO: 5482 - DNA, 23 bp, synthetic construct
  source 1..23: mol_type = other DNA
  modified_base 1..23: mod_base = OTHER; note = 2'-O-(2-methoxyethyl) nucleotide phosphorothioate
  modified_base 15: mod_base = OTHER; note = 5-methyl cytosine
  modified_base 20: mod_base = OTHER; note = 5-methyl cytosine
ggtaaagggaatggcatggcggg

SEQ ID NO: 5483 - DNA, 23 bp, synthetic construct
  source 1..23: mol_type = other DNA
  modified_base 1..23: mod_base = OTHER; note = 2'-O-(2-methoxyethyl) nucleotide phosphorothioate
  modified_base 8: mod_base = OTHER; note = A nucleoside-replacement group characterized by the lack of a nucleotide base
  modified_base 16: mod_base = OTHER; note = A nucleoside-replacement group characterized by the lack of a nucleotide base
  modified_base 5: mod_base = OTHER; note = 5-methyl cytosine
  modified_base 9: mod_base = OTHER; note = 5-methyl cytosine
  modified_base 11: mod_base = OTHER; note = 5-methyl cytosine
  modified_base 13: mod_base = OTHER; note = 5-methyl cytosine
  modified_base 17: mod_base = OTHER; note = 5-methyl cytosine
  modified_base 20..21: mod_base = OTHER; note = 5-methyl cytosine
agttcaancacacatncttccat

SEQ ID NO: 5484 - DNA, 23 bp, synthetic construct
  source 1..23: mol_type = other DNA
  modified_base 1..23: mod_base = OTHER; note = 2'-O-(2-methoxyethyl) nucleotide phosphorothioate
  modified_base 8: mod_base = OTHER; note = A nucleoside-replacement group characterized by the lack of a nucleotide base
  modified_base 16: mod_base = OTHER; note = A nucleoside-replacement group characterized by the lack of a nucleotide base
  modified_base 1: mod_base = OTHER; note = 5-methyl cytosine
  modified_base 3: mod_base = OTHER; note = 5-methyl cytosine
  modified_base 6..7: mod_base = OTHER; note = 5-methyl cytosine
  modified_base 10..11: mod_base = OTHER; note = 5-methyl cytosine
  modified_base 14..15: mod_base = OTHER; note = 5-methyl cytosine
  modified_base 18..19: mod_base = OTHER; note = 5-methyl cytosine
  modified_base 23: mod_base = OTHER; note = 5-methyl cytosine
cacatccntccatccntccattc

SEQ ID NO: 5485 - DNA, 23 bp, synthetic construct
  source 1..23: mol_type = other DNA
  modified_base 1..23: mod_base = OTHER; note = 2'-O-(2-methoxyethyl) nucleotide phosphorothioate
  modified_base 8: mod_base = OTHER; note = A nucleoside-replacement group characterized by the lack of a nucleotide base
  modified_base 16: mod_base = OTHER; note = A nucleoside-replacement group characterized by the lack of a nucleotide base
  modified_base 21: mod_base = OTHER; note = 5-methyl cytosine
aggtaaanggaatggnatggcgg

SEQ ID NO: 5486 - DNA, 25 bp, synthetic construct
  source 1..25: mol_type = other DNA
  modified_base 1..25: mod_base = OTHER; note = 2'-O-(2-methoxyethyl) nucleotide phosphorothioate
  modified_base 7: mod_base = OTHER; note = A nucleoside-replacement group characterized by the lack of a nucleotide base
  modified_base 19: mod_base = OTHER; note = A nucleoside-replacement group characterized by the lack of a nucleotide base
  modified_base 4: mod_base = OTHER; note = 5-methyl cytosine
  modified_base 8: mod_base = OTHER; note = 5-methyl cytosine
gggcagncaggaatggtgngtggaa

SEQ ID NO: 5487 - DNA, 23 bp, synthetic construct
  source 1..23: mol_type = other DNA
  modified_base 1..23: mod_base = OTHER; note = 2'-O-(2-methoxyethyl) nucleotide phosphorothioate
  modified_base 8: mod_base = OTHER; note = A nucleoside-replacement group characterized by the lack of a nucleotide base
  modified_base 16: mod_base = OTHER; note = A nucleoside-replacement group characterized by the lack of a nucleotide base
  modified_base 4..5: mod_base = OTHER; note = 5-methyl cytosine
  modified_base 7: mod_base = OTHER; note = 5-methyl cytosine
  modified_base 10: mod_base = OTHER; note = 5-methyl cytosine
  modified_base 17: mod_base = OTHER; note = 5-methyl cytosine
  modified_base 19..20: mod_base = OTHER; note = 5-methyl cytosine
  modified_base 23: mod_base = OTHER; note = 5-methyl cytosine
gatccgcnacttaatncacctac

SEQ ID NO: 5488 - DNA, 23 bp, synthetic construct
  source 1..23: mol_type = other DNA
  modified_base 1..23: mod_base = OTHER; note = 2'-O-(2-methoxyethyl) nucleotide phosphorothioate
  modified_base 7: mod_base = OTHER; note = 5-methyl cytosine
  modified_base 10..11: mod_base = OTHER; note = 5-methyl cytosine
  modified_base 13: mod_base = OTHER; note = 5-methyl cytosine
  modified_base 15: mod_base = OTHER; note = 5-methyl cytosine
  modified_base 18..19: mod_base = OTHER; note = 5-methyl cytosine
  modified_base 22..23: mod_base = OTHER; note = 5-methyl cytosine
gtaattcaaccacacatccatcc

SEQ ID NO: 5489 - DNA, 23 bp, synthetic construct
  source 1..23: mol_type = other DNA
  modified_base 1..23: mod_base = OTHER; note = 2'-O-(2-methoxyethyl) nucleotide phosphorothioate
  modified_base 8: mod_base = OTHER; note = A nucleoside-replacement group characterized by the lack of a nucleotide base
  modified_base 16: mod_base = OTHER; note = A nucleoside-replacement group characterized by the lack of a nucleotide base
  modified_base 12..14: mod_base = OTHER; note = 5-methyl cytosine
  modified_base 20: mod_base = OTHER; note = 5-methyl cytosine
agaggagntgaccctnaatctgg

SEQ ID NO: 5490 - DNA, 23 bp, synthetic construct
  source 1..23: mol_type = other DNA
  modified_base 1..23: mod_base = OTHER; note = 2'-O-(2-methoxyethyl) nucleotide phosphorothioate
  modified_base 8: mod_base = OTHER; note = A nucleoside-replacement group characterized by the lack of a nucleotide base
  modified_base 16: mod_base = OTHER; note = A nucleoside-replacement group characterized by the lack of a nucleotide base
  modified_base 4: mod_base = OTHER; note = 5-methyl cytosine
  modified_base 7: mod_base = OTHER; note = 5-methyl cytosine
  modified_base 10: mod_base = OTHER; note = 5-methyl cytosine
  modified_base 12: mod_base = OTHER; note = 5-methyl cytosine
  modified_base 15: mod_base = OTHER; note = 5-methyl cytosine
  modified_base 19..20: mod_base = OTHER; note = 5-methyl cytosine
gttcaacnacacatcnttccatt

SEQ ID NO: 5491 - DNA, 23 bp, synthetic construct
  source 1..23: mol_type = other DNA
  modified_base 1..23: mod_base = OTHER; note = 2'-O-(2-methoxyethyl) nucleotide phosphorothioate
  modified_base 1: mod_base = OTHER; note = 5-methyl cytosine
  modified_base 9: mod_base = OTHER; note = 5-methyl cytosine
  modified_base 12..13: mod_base = OTHER; note = 5-methyl cytosine
  modified_base 15: mod_base = OTHER; note = 5-methyl cytosine
  modified_base 17: mod_base = OTHER; note = 5-methyl cytosine
  modified_base 20..21: mod_base = OTHER; note = 5-methyl cytosine
cagtaattcaaccacacatccat

SEQ ID NO: 5492 - DNA, 23 bp, synthetic construct
  source 1..23: mol_type = other DNA
  modified_base 1..23: mod_base = OTHER; note = 2'-O-(2-methoxyethyl) nucleotide phosphorothioate
  modified_base 8: mod_base = OTHER; note = A nucleoside-replacement group characterized by the lack of a nucleotide base
  modified_base 16: mod_base = OTHER; note = A nucleoside-replacement group characterized by the lack of a nucleotide base
  modified_base 3..4: mod_base = OTHER; note = 5-methyl cytosine
  modified_base 6: mod_base = OTHER; note = 5-methyl cytosine
  modified_base 9: mod_base = OTHER; note = 5-methyl cytosine
  modified_base 15: mod_base = OTHER; note = 5-methyl cytosine
  modified_base 18..19: mod_base = OTHER; note = 5-methyl cytosine
  modified_base 22..23: mod_base = OTHER; note = 5-methyl cytosine
atccgcancttaatcnacctacc

SEQ ID NO: 5493 - DNA, 23 bp, synthetic construct
  source 1..23: mol_type = other DNA
  modified_base 1..23: mod_base = OTHER; note = 2'-O-(2-methoxyethyl) nucleotide phosphorothioate
  modified_base 16: mod_base = OTHER; note = 5-methyl cytosine
  modified_base 21: mod_base = OTHER; note = 5-methyl cytosine
aggtaaagggaatggcatggcgg

SEQ ID NO: 5494 - DNA, 23 bp, synthetic construct
  source 1..23: mol_type = other DNA
  modified_base 1..23: mod_base = OTHER; note = 2'-O-(2-methoxyethyl) nucleotide phosphorothioate
  modified_base 8: mod_base = OTHER; note = A nucleoside-replacement group characterized by the lack of a nucleotide base
  modified_base 16: mod_base = OTHER; note = A nucleoside-replacement group characterized by the lack of a nucleotide base
  modified_base 2..3: mod_base = OTHER; note = 5-methyl cytosine
  modified_base 5: mod_base = OTHER; note = 5-methyl cytosine
  modified_base 14..15: mod_base = OTHER; note = 5-methyl cytosine
  modified_base 17..18: mod_base = OTHER; note = 5-methyl cytosine
  modified_base 21..23: mod_base = OTHER; note = 5-methyl cytosine
tccgcaanttaatccncctaccc

SEQ ID NO: 5495 - DNA, 23 bp, synthetic construct
  source 1..23: mol_type = other DNA
  modified_base 1..23: mod_base = OTHER; note = 2'-O-(2-methoxyethyl) nucleotide phosphorothioate
  modified_base 8: mod_base = OTHER; note = A nucleoside-replacement group characterized by the lack of a nucleotide base
  modified_base 16: mod_base = OTHER; note = A nucleoside-replacement group characterized by the lack of a nucleotide base
  modified_base 10..12: mod_base = OTHER; note = 5-methyl cytosine
  modified_base 18: mod_base = OTHER; note = 5-methyl cytosine
  modified_base 23: mod_base = OTHER; note = 5-methyl cytosine
aggaggtnaccctgantctggac

SEQ ID NO: 5496 - DNA, 25 bp, synthetic construct
  source 1..25: mol_type = other DNA
  modified_base 1..25: mod_base = OTHER; note = 2'-O-(2-methoxyethyl) nucleotide phosphorothioate
  modified_base 7: mod_base = OTHER; note = A nucleoside-replacement group characterized by the lack of a nucleotide base
  modified_base 19: mod_base = OTHER; note = A nucleoside-replacement group characterized by the lack of a nucleotide base
  modified_base 5: mod_base = OTHER; note = 5-methyl cytosine
  modified_base 8..9: mod_base = OTHER; note = 5-methyl cytosine
  modified_base 11: mod_base = OTHER; note = 5-methyl cytosine
  modified_base 13: mod_base = OTHER; note = 5-methyl cytosine
  modified_base 16..17: mod_base = OTHER; note = 5-methyl cytosine
  modified_base 20..21: mod_base = OTHER; note = 5-methyl cytosine
  modified_base 25: mod_base = OTHER; note = 5-methyl cytosine
agttcanccacacatcctnccattc

SEQ ID NO: 5497 - DNA, 25 bp, synthetic construct
  source 1..25: mol_type = other DNA
  modified_base 1..25: mod_base = OTHER; note = 2'-O-(2-methoxyethyl) nucleotide phosphorothioate
  modified_base 7: mod_base = OTHER; note = A nucleoside-replacement group characterized by the lack of a nucleotide base
  modified_base 19: mod_base = OTHER; note = A nucleoside-replacement group characterized by the lack of a nucleotide base
  modified_base 1: mod_base = OTHER; note = 5-methyl cytosine
  modified_base 9: mod_base = OTHER; note = 5-methyl cytosine
  modified_base 12..13: mod_base = OTHER; note = 5-methyl cytosine
  modified_base 15: mod_base = OTHER; note = 5-methyl cytosine
  modified_base 17: mod_base = OTHER; note = 5-methyl cytosine
  modified_base 20..21: mod_base = OTHER; note = 5-methyl cytosine
  modified_base 24..25: mod_base = OTHER; note = 5-methyl cytosine
cagtaantcaaccacacanccatcc

SEQ ID NO: 5498 - DNA, 25 bp, synthetic construct
  source 1..25: mol_type = other DNA
  modified_base 1..25: mod_base = OTHER; note = 2'-O-(2-methoxyethyl) nucleotide phosphorothioate
  modified_base 5: mod_base = OTHER; note = 5-methyl cytosine
  modified_base 8..9: mod_base = OTHER; note = 5-methyl cytosine
  modified_base 11: mod_base = OTHER; note = 5-methyl cytosine
  modified_base 13: mod_base = OTHER; note = 5-methyl cytosine
  modified_base 16..17: mod_base = OTHER; note = 5-methyl cytosine
  modified_base 20..21: mod_base = OTHER; note = 5-methyl cytosine
  modified_base 25: mod_base = OTHER; note = 5-methyl cytosine
agttcaaccacacatccttccattc

SEQ ID NO: 5499 - DNA, 23 bp, synthetic construct
  source 1..23: mol_type = other DNA
  modified_base 1..23: mod_base = OTHER; note = 2'-O-(2-methoxyethyl) nucleotide phosphorothioate
  modified_base 8: mod_base = OTHER; note = A nucleoside-replacement group characterized by the lack of a nucleotide base
  modified_base 16: mod_base = OTHER; note = A nucleoside-replacement group characterized by the lack of a nucleotide base
  modified_base 15: mod_base = OTHER; note = 5-methyl cytosine
  modified_base 20: mod_base = OTHER; note = 5-methyl cytosine
ggtaaagngaatggcntggcggg

SEQ ID NO: 5500 - DNA, 25 bp, synthetic construct
  source 1..25: mol_type = other DNA
  modified_base 1..25: mod_base = OTHER; note = 2'-O-(2-methoxyethyl) nucleotide phosphorothioate
  modified_base 1: mod_base = OTHER; note = 5-methyl cytosine
  modified_base 9: mod_base = OTHER; note = 5-methyl cytosine
  modified_base 12..13: mod_base = OTHER; note = 5-methyl cytosine
  modified_base 15: mod_base = OTHER; note = 5-methyl cytosine
  modified_base 17: mod_base = OTHER; note = 5-methyl cytosine
  modified_base 20..21: mod_base = OTHER; note = 5-methyl cytosine
  modified_base 24..25: mod_base = OTHER; note = 5-methyl cytosine
cagtaattcaaccacacatccatcc

SEQ ID NO: 5501 - DNA, 23 bp, synthetic construct
  source 1..23: mol_type = other DNA
  modified_base 1..23: mod_base = OTHER; note = 2'-O-(2-methoxyethyl) nucleotide phosphorothioate
  modified_base 8: mod_base = OTHER; note = A nucleoside-replacement group characterized by the lack of a nucleotide base
  modified_base 16: mod_base = OTHER; note = A nucleoside-replacement group characterized by the lack of a nucleotide base
  modified_base 3: mod_base = OTHER; note = 5-methyl cytosine
  modified_base 6..7: mod_base = OTHER; note = 5-methyl cytosine
  modified_base 9: mod_base = OTHER; note = 5-methyl cytosine
  modified_base 11: mod_base = OTHER; note = 5-methyl cytosine
  modified_base 14..15: mod_base = OTHER; note = 5-methyl cytosine
  modified_base 18..19: mod_base = OTHER; note = 5-methyl cytosine
  modified_base 23: mod_base = OTHER; note = 5-methyl cytosine
ttcaaccncacatccntccattc

SEQ ID NO: 5502 - DNA, 25 bp, synthetic construct
  source 1..25: mol_type = other DNA
  modified_base 1..25: mod_base = OTHER; note = 2'-O-(2-methoxyethyl) nucleotide phosphorothioate
  modified_base 9: mod_base = OTHER; note = A nucleoside-replacement group characterized by the lack of a nucleotide base
  modified_base 19: mod_base = OTHER; note = A nucleoside-replacement group characterized by the lack of a nucleotide base
  modified_base 1: mod_base = OTHER; note = 5-methyl cytosine
  modified_base 5: mod_base = OTHER; note = 5-methyl cytosine
  modified_base 13: mod_base = OTHER; note = 5-methyl cytosine
  modified_base 16..17: mod_base = OTHER; note = 5-methyl cytosine
  modified_base 21: mod_base = OTHER; note = 5-methyl cytosine
  modified_base 24..25: mod_base = OTHER; note = 5-methyl cytosine
cttgcaatngttcaaccanacatcc

SEQ ID NO: 5503 - DNA, 25 bp, synthetic construct
  source 1..25: mol_type = other DNA
  modified_base 1..25: mod_base = OTHER; note = 2'-O-(2-methoxyethyl) nucleotide phosphorothioate
  modified_base 7: mod_base = OTHER; note = 5-methyl cytosine
  modified_base 12: mod_base = OTHER; note = 5-methyl cytosine
  modified_base 16: mod_base = OTHER; note = 5-methyl cytosine
gaagagctgggcaggcaggaatggt

SEQ ID NO: 5504 - DNA, 25 bp, synthetic construct
  source 1..25: mol_type = other DNA
  modified_base 1..25: mod_base = OTHER; note = 2'-O-(2-methoxyethyl) nucleotide phosphorothioate
  modified_base 4..5: mod_base = OTHER; note = 5-methyl cytosine
  modified_base 7: mod_base = OTHER; note = 5-methyl cytosine
  modified_base 10: mod_base = OTHER; note = 5-methyl cytosine
  modified_base 16..17: mod_base = OTHER; note = 5-methyl cytosine
  modified_base 19..20: mod_base = OTHER; note = 5-methyl cytosine
  modified_base 23..25: mod_base = OTHER; note = 5-methyl cytosine
gatccgcaacttaatccacctaccc

SEQ ID NO: 5505 - DNA, 25 bp, synthetic construct
  source 1..25: mol_type = other DNA
  modified_base 1..25: mod_base = OTHER; note = 2'-O-(2-methoxyethyl) nucleotide phosphorothioate
  modified_base 9: mod_base = OTHER; note = A nucleoside-replacement group characterized by the lack of a nucleotide base
  modified_base 19: mod_base = OTHER; note = A nucleoside-replacement group characterized by the lack of a nucleotide base
  modified_base 2: mod_base = OTHER; note = 5-methyl cytosine
  modified_base 4: mod_base = OTHER; note = 5-methyl cytosine
  modified_base 7..8: mod_base = OTHER; note = 5-methyl cytosine
  modified_base 11..12: mod_base = OTHER; note = 5-methyl cytosine
  modified_base 15..16: mod_base = OTHER; note = 5-methyl cytosine
  modified_base 20: mod_base = OTHER; note = 5-methyl cytosine
  modified_base 24: mod_base = OTHER; note = 5-methyl cytosine
acacatccntccatccatncattca

SEQ ID NO: 5506 - DNA, 25 bp, synthetic construct
  source 1..25: mol_type = other DNA
  modified_base 1..25: mod_base = OTHER; note = 2'-O-(2-methoxyethyl) nucleotide phosphorothioate
  modified_base 15: mod_base = OTHER; note = 5-methyl cytosine
  modified_base 18..19: mod_base = OTHER; note = 5-methyl cytosine
tgagtagtgagagtcaacctggagg

SEQ ID NO: 5507 - DNA, 25 bp, synthetic construct
  source 1..25: mol_type = other DNA
  modified_base 1..25: mod_base = OTHER; note = 2'-O-(2-methoxyethyl) nucleotide phosphorothioate
  modified_base 5: mod_base = OTHER; note = 5-methyl cytosine
  modified_base 10: mod_base = OTHER; note = 5-methyl cytosine
  modified_base 14: mod_base = OTHER; note = 5-methyl cytosine
  modified_base 18: mod_base = OTHER; note = 5-methyl cytosine
  modified_base 20: mod_base = OTHER; note = 5-methyl cytosine
atggcatggcgggcagtctcagagg

SEQ ID NO: 5508 - DNA, 23 bp, synthetic construct
  source 1..23: mol_type = other DNA
  modified_base 1..23: mod_base = OTHER; note = 2'-O-(2-methoxyethyl) nucleotide phosphorothioate
  modified_base 8: mod_base = OTHER; note = 5-methyl cytosine
  modified_base 11..12: mod_base = OTHER; note = 5-methyl cytosine
  modified_base 14: mod_base = OTHER; note = 5-methyl cytosine
  modified_base 16: mod_base = OTHER; note = 5-methyl cytosine
  modified_base 19..20: mod_base = OTHER; note = 5-methyl cytosine
  modified_base 23: mod_base = OTHER; note = 5-methyl cytosine
agtaattcaaccacacatccatc

SEQ ID NO: 5509 - DNA, 25 bp, synthetic construct
  source 1..25: mol_type = other DNA
  modified_base 1..25: mod_base = OTHER; note = 2'-O-(2-methoxyethyl) nucleotide phosphorothioate
  modified_base 2..3: mod_base = OTHER; note = 5-methyl cytosine
  modified_base 5..6: mod_base = OTHER; note = 5-methyl cytosine
  modified_base 9..10: mod_base = OTHER; note = 5-methyl cytosine
  modified_base 12: mod_base = OTHER; note = 5-methyl cytosine
  modified_base 14: mod_base = OTHER; note = 5-methyl cytosine
  modified_base 16: mod_base = OTHER; note = 5-methyl cytosine
  modified_base 19..20: mod_base = OTHER; note = 5-methyl cytosine
  modified_base 23..24: mod_base = OTHER; note = 5-methyl cytosine
tccaccagccactcacaaccatcca

SEQ ID NO: 5510 - DNA, 23 bp, synthetic construct
  source 1..23: mol_type = other DNA
  modified_base 1..23: mod_base = OTHER; note = 2'-O-(2-methoxyethyl) nucleotide phosphorothioate
  modified_base 10..12: mod_base = OTHER; note = 5-methyl cytosine
  modified_base 18: mod_base = OTHER; note = 5-methyl cytosine
  modified_base 23: mod_base = OTHER; note = 5-methyl cytosine
aggaggtgaccctgaatctggac

SEQ ID NO: 5511 - DNA, 25 bp, synthetic construct
  source 1..25: mol_type = other DNA
  modified_base 1..25: mod_base = OTHER; note = 2'-O-(2-methoxyethyl) nucleotide phosphorothioate
  modified_base 1: mod_base = OTHER; note = 5-methyl cytosine
  modified_base 3: mod_base = OTHER; note = 5-methyl cytosine
  modified_base 8: mod_base = OTHER; note = 5-methyl cytosine
  modified_base 11..13: mod_base = OTHER; note = 5-methyl cytosine
  modified_base 15..16: mod_base = OTHER; note = 5-methyl cytosine
  modified_base 19: mod_base = OTHER; note = 5-methyl cytosine
  modified_base 21: mod_base = OTHER; note = 5-methyl cytosine
  modified_base 24..25: mod_base = OTHER; note = 5-methyl cytosine
cacgaatctacccaccaactcatcc

SEQ ID NO: 5512 - DNA, 23 bp, synthetic construct
  source 1..23: mol_type = other DNA
  modified_base 1..23: mod_base = OTHER; note = 2'-O-(2-methoxyethyl) nucleotide phosphorothioate
  modified_base 11..13: mod_base = OTHER; note = 5-methyl cytosine
  modified_base 19: mod_base = OTHER; note = 5-methyl cytosine
gaggaggtgaccctgaatctgga

SEQ ID NO: 5513 - DNA, 23 bp, synthetic construct
  source 1..23: mol_type = other DNA
  modified_base 1..23: mod_base = OTHER; note = 2'-O-(2-methoxyethyl) nucleotide phosphorothioate
  modified_base 8: mod_base = OTHER; note = A nucleoside-replacement group characterized by the lack of a nucleotide base
  modified_base 16: mod_base = OTHER; note = A nucleoside-replacement group characterized by the lack of a nucleotide base
  modified_base 1..2: mod_base = OTHER; note = 5-methyl cytosine
  modified_base 6: mod_base = OTHER; note = 5-methyl cytosine
  modified_base 14: mod_base = OTHER; note = 5-methyl cytosine
  modified_base 17..18: mod_base = OTHER; note = 5-methyl cytosine
  modified_base 20: mod_base = OTHER; note = 5-methyl cytosine
  modified_base 22: mod_base = OTHER; note = 5-methyl cytosine
cctttcantaattcanccacaca

SEQ ID NO: 5514 - DNA, 25 bp, synthetic construct
  source 1..25: mol_type = other DNA
  modified_base 1..25: mod_base = OTHER; note = 2'-O-(2-methoxyethyl) nucleotide phosphorothioate
  modified_base 15..16: mod_base = OTHER; note = 5-methyl cytosine
tgtggatggtgtggccagaaagagg

SEQ ID NO: 5515 - DNA, 23 bp, synthetic construct
  source 1..23: mol_type = other DNA
  modified_base 1..23: mod_base = OTHER; note = 2'-O-(2-methoxyethyl) nucleotide phosphorothioate
  modified_base 3..4: mod_base = OTHER; note = 5-methyl cytosine
  modified_base 6: mod_base = OTHER; note = 5-methyl cytosine
  modified_base 9: mod_base = OTHER; note = 5-methyl cytosine
  modified_base 15..16: mod_base = OTHER; note = 5-methyl cytosine
  modified_base 18..19: mod_base = OTHER; note = 5-methyl cytosine
  modified_base 22..23: mod_base = OTHER; note = 5-methyl cytosine
atccgcaacttaatccacctacc

SEQ ID NO: 5516 - DNA, 23 bp, synthetic construct
  source 1..23: mol_type = other DNA
  modified_base 1..23: mod_base = OTHER; note = 2'-O-(2-methoxyethyl) nucleotide phosphorothioate
  modified_base 8: mod_base = OTHER; note = A nucleoside-replacement group characterized by the lack of a nucleotide base
  modified_base 16: mod_base = OTHER; note = A nucleoside-replacement group characterized by the lack of a nucleotide base
  modified_base 14: mod_base = OTHER; note = 5-methyl cytosine
  modified_base 19: mod_base = OTHER; note = 5-methyl cytosine
  modified_base 23: mod_base = OTHER; note = 5-methyl cytosine
gtaaaggnaatggcanggcgggc

SEQ ID NO: 5517 - DNA, 25 bp, synthetic construct
  source 1..25: mol_type = other DNA
  modified_base 1..25: mod_base = OTHER; note = 2'-O-(2-methoxyethyl) nucleotide phosphorothioate
  modified_base 3: mod_base = OTHER; note = 5-methyl cytosine
  modified_base 6: mod_base = OTHER; note = 5-methyl cytosine
  modified_base 10..11: mod_base = OTHER; note = 5-methyl cytosine
  modified_base 13..14: mod_base = OTHER; note = 5-methyl cytosine
  modified_base 17..18: mod_base = OTHER; note = 5-methyl cytosine
  modified_base 20: mod_base = OTHER; note = 5-methyl cytosine
  modified_base 22: mod_base = OTHER; note = 5-methyl cytosine
  modified_base 24: mod_base = OTHER; note = 5-methyl cytosine
ttcgtctgtccaccagccactcaca

SEQ ID NO: 5518 - DNA, 25 bp, synthetic construct
  source 1..25: mol_type = other DNA
  modified_base 1..25: mod_base = OTHER; note = 2'-O-(2-methoxyethyl) nucleotide phosphorothioate
  modified_base 2..3: mod_base = OTHER; note = 5-methyl cytosine
  modified_base 10: mod_base = OTHER; note = 5-methyl cytosine
  modified_base 13: mod_base = OTHER; note = 5-methyl cytosine
  modified_base 17..18: mod_base = OTHER; note = 5-methyl cytosine
  modified_base 20..21: mod_base = OTHER; note = 5-methyl cytosine
  modified_base 24..25: mod_base = OTHER; note = 5-methyl cytosine
tccatttttcgtctgtccaccagcc

SEQ ID NO: 5519 - DNA, 23 bp, synthetic construct
  source 1..23: mol_type = other DNA
  modified_base 1..23: mod_base = OTHER; note = 2'-O-(2-methoxyethyl) nucleotide phosphorothioate
  modified_base 12..14: mod_base = OTHER; note = 5-methyl cytosine
  modified_base 20: mod_base = OTHER; note = 5-methyl cytosine
agaggaggtgaccctgaatctgg

SEQ ID NO: 5520 - DNA, 25 bp, synthetic construct
  source 1..25: mol_type = other DNA
  modified_base 1..25: mod_base = OTHER; note = 2'-O-(2-methoxyethyl) nucleotide phosphorothioate
  modified_base 12..14: mod_base = OTHER; note = 5-methyl cytosine
  modified_base 20: mod_base = OTHER; note = 5-methyl cytosine
  modified_base 25: mod_base = OTHER; note = 5-methyl cytosine
agaggaggtgaccctgaatctggac

SEQ ID NO: 5521 - DNA, 25 bp, synthetic construct
  source 1..25: mol_type = other DNA
  modified_base 1..25: mod_base = OTHER; note = 2'-O-(2-methoxyethyl) nucleotide phosphorothioate
  modified_base 3..4: mod_base = OTHER; note = 5-methyl cytosine
ggccaggagagtgtggatggtgtgg

SEQ ID NO: 5522 - DNA, 23 bp, synthetic construct
  source 1..23: mol_type = other DNA
  modified_base 1..23: mod_base = OTHER; note = 2'-O-(2-methoxyethyl) nucleotide phosphorothioate
  modified_base 14: mod_base = OTHER; note = 5-methyl cytosine
  modified_base 19: mod_base = OTHER; note = 5-methyl cytosine
  modified_base 23: mod_base = OTHER; note = 5-methyl cytosine
gtaaagggaatggcatggcgggc

SEQ ID NO: 5523 - DNA, 25 bp, synthetic construct
  source 1..25: mol_type = other DNA
  modified_base 1..25: mod_base = OTHER; note = 2'-O-(2-methoxyethyl) nucleotide phosphorothioate
  modified_base 2..3: mod_base = OTHER; note = 5-methyl cytosine
  modified_base 19: mod_base = OTHER; note = 5-methyl cytosine
  modified_base 24: mod_base = OTHER; note = 5-methyl cytosine
tccaggtaaagggaatggcatggcg

SEQ ID NO: 5524 - DNA, 25 bp, synthetic construct
  source 1..25: mol_type = other DNA
  modified_base 1..25: mod_base = OTHER; note = 2'-O-(2-methoxyethyl) nucleotide phosphorothioate
  modified_base 12: mod_base = OTHER; note = 5-methyl cytosine
  modified_base 17: mod_base = OTHER; note = 5-methyl cytosine
  modified_base 21: mod_base = OTHER; note = 5-methyl cytosine
  modified_base 25: mod_base = OTHER; note = 5-methyl cytosine
aaagggaatggcatggcgggcagtc

SEQ ID NO: 5525 - DNA, 25 bp, synthetic construct
  source 1..25: mol_type = other DNA
  modified_base 1..25: mod_base = OTHER; note = 2'-O-(2-methoxyethyl) nucleotide phosphorothioate
  modified_base 9: mod_base = OTHER; note = 5-methyl cytosine
  modified_base 13..15: mod_base = OTHER; note = 5-methyl cytosine
  modified_base 19: mod_base = OTHER; note = 5-methyl cytosine
  modified_base 21: mod_base = OTHER; note = 5-methyl cytosine
  modified_base 25: mod_base = OTHER; note = 5-methyl cytosine
ggaagagacatacccagacacaaac

SEQ ID NO: 5526 - DNA, 25 bp, synthetic construct
  source 1..25: mol_type = other DNA
  modified_base 1..25: mod_base = OTHER; note = 2'-O-(2-methoxyethyl) nucleotide phosphorothioate
  modified_base 1: mod_base = OTHER; note = 5-methyl cytosine
  modified_base 4: mod_base = OTHER; note = 5-methyl cytosine
  modified_base 14: mod_base = OTHER; note = 5-methyl cytosine
  modified_base 18..20: mod_base = OTHER; note = 5-methyl cytosine
  modified_base 24: mod_base = OTHER; note = 5-methyl cytosine
cagctggaagagacatacccagaca

SEQ ID NO: 5527 - DNA, 25 bp, synthetic construct
  source 1..25: mol_type = other DNA
  modified_base 1..25: mod_base = OTHER; note = 2'-O-(2-methoxyethyl) nucleotide phosphorothioate
  modified_base 8: mod_base = OTHER; note = 5-methyl cytosine
  modified_base 12..14: mod_base = OTHER; note = 5-methyl cytosine
  modified_base 18: mod_base = OTHER; note = 5-methyl cytosine
  modified_base 20: mod_base = OTHER; note = 5-methyl cytosine
  modified_base 24: mod_base = OTHER; note = 5-methyl cytosine
gaagagacatacccagacacaaacg

SEQ ID NO: 5528 - DNA, 25 bp, synthetic construct
  source 1..25: mol_type = other DNA
  modified_base 1..25: mod_base = OTHER; note = 2'-O-(2-methoxyethyl) nucleotide phosphorothioate
  modified_base 7: mod_base = OTHER; note = 5-methyl cytosine
  modified_base 11..12: mod_base = OTHER; note = 5-methyl cytosine
  modified_base 19..21: mod_base = OTHER; note = 5-methyl cytosine
  modified_base 25: mod_base = OTHER; note = 5-methyl cytosine
agagttctttccaggaaacccaggc

SEQ ID NO: 5529 - DNA, 25 bp, synthetic construct
  source 1..25: mol_type = other DNA
  modified_base 1..25: mod_base = OTHER; note = 2'-O-(2-methoxyethyl) nucleotide phosphorothioate
  modified_base 8: mod_base = OTHER; note = 5-methyl cytosine
  modified_base 12..13: mod_base = OTHER; note = 5-methyl cytosine
  modified_base 20..22: mod_base = OTHER; note = 5-methyl cytosine
aagagttctttccaggaaacccagg

SEQ ID NO: 5530 - DNA, 25 bp, synthetic construct
  source 1..25: mol_type = other DNA
  modified_base 1..25: mod_base = OTHER; note = 2'-O-(2-methoxyethyl) nucleotide phosphorothioate
  modified_base 6: mod_base = OTHER; note = 5-methyl cytosine
  modified_base 10..11: mod_base = OTHER; note = 5-methyl cytosine
  modified_base 18..20: mod_base = OTHER; note = 5-methyl cytosine
  modified_base 24: mod_base = OTHER; note = 5-methyl cytosine
gagttctttccaggaaacccaggca

SEQ ID NO: 5531 - DNA, 25 bp, synthetic construct
  source 1..25: mol_type = other DNA
  modified_base 1..25: mod_base = OTHER; note = 2'-O-(2-methoxyethyl) nucleotide phosphorothioate
  modified_base 5: mod_base = OTHER; note = 5-methyl cytosine
  modified_base 9..10: mod_base = OTHER; note = 5-methyl cytosine
  modified_base 17..19: mod_base = OTHER; note = 5-methyl cytosine
  modified_base 23: mod_base = OTHER; note = 5-methyl cytosine
agttctttccaggaaacccaggcag

SEQ ID NO: 5532 - DNA, 25 bp, synthetic construct
  source 1..25: mol_type = other DNA
  modified_base 1..25: mod_base = OTHER; note = 2'-O-(2-methoxyethyl) nucleotide phosphorothioate
  modified_base 4: mod_base = OTHER; note = 5-methyl cytosine
  modified_base 7: mod_base = OTHER; note = 5-methyl cytosine
  modified_base 17: mod_base = OTHER; note = 5-methyl cytosine
  modified_base 21..23: mod_base = OTHER; note = 5-methyl cytosine
aggcagctggaagagacatacccag

SEQ ID NO: 5533 - DNA, 25 bp, synthetic construct
  source 1..25: mol_type = other DNA
  modified_base 1..25: mod_base = OTHER; note = 2'-O-(2-methoxyethyl) nucleotide phosphorothioate
  modified_base 6: mod_base = OTHER; note = 5-methyl cytosine
  modified_base 10..12: mod_base = OTHER; note = 5-methyl cytosine
  modified_base 16: mod_base = OTHER; note = 5-methyl cytosine
  modified_base 18: mod_base = OTHER; note = 5-methyl cytosine
  modified_base 22: mod_base = OTHER; note = 5-methyl cytosine
  modified_base 25: mod_base = OTHER; note = 5-methyl cytosine
agagacatacccagacacaaacggc

SEQ ID NO: 5534 - DNA, 25 bp, synthetic construct
  source 1..25: mol_type = other DNA
  modified_base 1..25: mod_base = OTHER; note = 2'-O-(2-methoxyethyl) nucleotide phosphorothioate
  modified_base 1: mod_base = OTHER; note = 5-methyl cytosine
  modified_base 11: mod_base = OTHER; note = 5-methyl cytosine
  modified_base 15..17: mod_base = OTHER; note = 5-methyl cytosine
  modified_base 21: mod_base = OTHER; note = 5-methyl cytosine
  modified_base 23: mod_base = OTHER; note = 5-methyl cytosine
ctggaagagacatacccagacacaa

SEQ ID NO: 5535 - DNA, 25 bp, synthetic construct
  source 1..25: mol_type = other DNA
  modified_base 1..25: mod_base = OTHER; note = 2'-O-(2-methoxyethyl) nucleotide phosphorothioate
  modified_base 7: mod_base = OTHER; note = 5-methyl cytosine
  modified_base 11..13: mod_base = OTHER; note = 5-methyl cytosine
  modified_base 17: mod_base = OTHER; note = 5-methyl cytosine
  modified_base 19: mod_base = OTHER; note = 5-methyl cytosine
  modified_base 23: mod_base = OTHER; note = 5-methyl cytosine
aagagacatacccagacacaaacgg

SEQ ID NO: 5536 - DNA, 25 bp, synthetic construct
  source 1..25: mol_type = other DNA
  modified_base 1..25: mod_base = OTHER; note = 2'-O-(2-methoxyethyl) nucleotide phosphorothioate
  modified_base 4: mod_base = OTHER; note = 5-methyl cytosine
  modified_base 8..10: mod_base = OTHER; note = 5-methyl cytosine
  modified_base 14: mod_base = OTHER; note = 5-methyl cytosine
  modified_base 16: mod_base = OTHER; note = 5-methyl cytosine
  modified_base 20: mod_base = OTHER; note = 5-methyl cytosine
  modified_base 23..25: mod_base = OTHER; note = 5-methyl cytosine
agacatacccagacacaaacggccc

SEQ ID NO: 5537 - DNA, 25 bp, synthetic construct
  source 1..25: mol_type = other DNA
  modified_base 1..25: mod_base = OTHER; note = 2'-O-(2-methoxyethyl) nucleotide phosphorothioate
  modified_base 3: mod_base = OTHER; note = 5-methyl cytosine
  modified_base 6: mod_base = OTHER; note = 5-methyl cytosine
  modified_base 16: mod_base = OTHER; note = 5-methyl cytosine
  modified_base 20..22: mod_base = OTHER; note = 5-methyl cytosine
ggcagctggaagagacatacccaga

SEQ ID NO: 5538 - DNA, 25 bp, synthetic construct
  source 1..25: mol_type = other DNA
  modified_base 1..25: mod_base = OTHER; note = 2'-O-(2-methoxyethyl) nucleotide phosphorothioate
  modified_base 1: mod_base = OTHER; note = 5-methyl cytosine
  modified_base 5: mod_base = OTHER; note = 5-methyl cytosine
  modified_base 8: mod_base = OTHER; note = 5-methyl cytosine
  modified_base 18: mod_base = OTHER; note = 5-methyl cytosine
  modified_base 22..24: mod_base = OTHER; note = 5-methyl cytosine
caggcagctggaagagacataccca

SEQ ID NO: 5539 - DNA, 25 bp, synthetic construct
  source 1..25: mol_type = other DNA
  modified_base 1..25: mod_base = OTHER; note = 2'-O-(2-methoxyethyl) nucleotide phosphorothioate
  modified_base 2: mod_base = OTHER; note = 5-methyl cytosine
  modified_base 12: mod_base = OTHER; note = 5-methyl cytosine
  modified_base 16..18: mod_base = OTHER; note = 5-methyl cytosine
  modified_base 22: mod_base = OTHER; note = 5-methyl cytosine
  modified_base 24: mod_base = OTHER; note = 5-methyl cytosine
gctggaagagacatacccagacaca

SEQ ID NO: 5540 - DNA, 25 bp, synthetic construct
  source 1..25: mol_type = other DNA
  modified_base 1..25: mod_base = OTHER; note = 2'-O-(2-methoxyethyl) nucleotide phosphorothioate
  modified_base 3: mod_base = OTHER; note = 5-methyl cytosine
  modified_base 13: mod_base = OTHER; note = 5-methyl cytosine
  modified_base 17..19: mod_base = OTHER; note = 5-methyl cytosine
  modified_base 23: mod_base = OTHER; note = 5-methyl cytosine
  modified_base 25: mod_base = OTHER; note = 5-methyl cytosine
agctggaagagacatacccagacac

SEQ ID NO: 5541 - DNA, 25 bp, synthetic construct
  source 1..25: mol_type = other DNA
  modified_base 1..25: mod_base = OTHER; note = 2'-O-(2-methoxyethyl) nucleotide phosphorothioate
  modified_base 2: mod_base = OTHER; note = 5-methyl cytosine
  modified_base 5: mod_base = OTHER; note = 5-methyl cytosine
  modified_base 15: mod_base = OTHER; note = 5-methyl cytosine
  modified_base 19..21: mod_base = OTHER; note = 5-methyl cytosine
  modified_base 25: mod_base = OTHER; note = 5-methyl cytosine
gcagctggaagagacatacccagac

SEQ ID NO: 5542 - DNA, 25 bp, synthetic construct
  source 1..25: mol_type = other DNA
  modified_base 1..25: mod_base = OTHER; note = 2'-O-(2-methoxyethyl) nucleotide phosphorothioate
  modified_base 3: mod_base = OTHER; note = 5-methyl cytosine
  modified_base 7..9: mod_base = OTHER; note = 5-methyl cytosine
  modified_base 13: mod_base = OTHER; note = 5-methyl cytosine
  modified_base 15: mod_base = OTHER; note = 5-methyl cytosine
  modified_base 19: mod_base = OTHER; note = 5-methyl cytosine
  modified_base 22..24: mod_base = OTHER; note = 5-methyl cytosine
gacatacccagacacaaacggccca

SEQ ID NO: 5543 - DNA, 25 bp, synthetic construct
  source 1..25: mol_type = other DNA
  modified_base 1..25: mod_base = OTHER; note = 2'-O-(2-methoxyethyl) nucleotide phosphorothioate
  modified_base 5: mod_base = OTHER; note = 5-methyl cytosine
  modified_base 9..11: mod_base = OTHER; note = 5-methyl cytosine
  modified_base 15: mod_base = OTHER; note = 5-methyl cytosine
  modified_base 17: mod_base = OTHER; note = 5-methyl cytosine
  modified_base 21: mod_base = OTHER; note = 5-methyl cytosine
  modified_base 24..25: mod_base = OTHER; note = 5-methyl cytosine
gagacatacccagacacaaacggcc

SEQ ID NO: 5544 - DNA, 25 bp, synthetic construct
  source 1..25: mol_type = other DNA
  modified_base 1..25: mod_base = OTHER; note = 2'-O-(2-methoxyethyl) nucleotide phosphorothioate
  modified_base 2: mod_base = OTHER; note = 5-methyl cytosine
  modified_base 5..6: mod_base = OTHER; note = 5-methyl cytosine
  modified_base 9..10: mod_base = OTHER; note = 5-methyl cytosine
  modified_base 13..14: mod_base = OTHER; note = 5-methyl cytosine
  modified_base 17..18: mod_base = OTHER; note = 5-methyl cytosine
  modified_base 22: mod_base = OTHER; note = 5-methyl cytosine
  modified_base 25: mod_base = OTHER; note = 5-methyl cytosine
acatccatccatccatccattcatc

SEQ ID NO: 5545 - DNA, 25 bp, synthetic construct
  source 1..25: mol_type = other DNA
  modified_base 1..25: mod_base = OTHER; note = 2'-O-(2-methoxyethyl) nucleotide phosphorothioate
  modified_base 1: mod_base = OTHER; note = 5-methyl cytosine
  modified_base 3: mod_base = OTHER; note = 5-methyl cytosine
  modified_base 6..7: mod_base = OTHER; note = 5-methyl cytosine
  modified_base 10..11: mod_base = OTHER; note = 5-methyl cytosine
  modified_base 14..15: mod_base = OTHER; note = 5-methyl cytosine
  modified_base 18..19: mod_base = OTHER; note = 5-methyl cytosine
  modified_base 23: mod_base = OTHER; note = 5-methyl cytosine
cacatccatccatccatccattcat

SEQ ID NO: 5546 - DNA, 25 bp, synthetic construct
  source 1..25: mol_type = other DNA
  modified_base 1..25: mod_base = OTHER; note = 2'-O-(2-methoxyethyl) nucleotide phosphorothioate
  modified_base 1..2: mod_base = OTHER; note = 5-methyl cytosine
  modified_base 6: mod_base = OTHER; note = 5-methyl cytosine
  modified_base 9: mod_base = OTHER; note = 5-methyl cytosine
  modified_base 19: mod_base = OTHER; note = 5-methyl cytosine
  modified_base 23..25: mod_base = OTHER; note = 5-methyl cytosine
ccaggcagctggaagagacataccc

SEQ ID NO: 5547 - DNA, 25 bp, synthetic construct
  source 1..25: mol_type = other DNA
  modified_base 1..25: mod_base = OTHER; note = 2'-O-(2-methoxyethyl) nucleotide phosphorothioate
  modified_base 3..4: mod_base = OTHER; note = 5-methyl cytosine
  modified_base 7..8: mod_base = OTHER; note = 5-methyl cytosine
  modified_base 11..12: mod_base = OTHER; note = 5-methyl cytosine
  modified_base 15..16: mod_base = OTHER; note = 5-methyl cytosine
  modified_base 20: mod_base = OTHER; note = 5-methyl cytosine
  modified_base 23..24: mod_base = OTHER; note = 5-methyl cytosine
atccatccatccatccattcatcca

SEQ ID NO: 5548 - DNA, 25 bp, synthetic construct
  source 1..25: mol_type = other DNA
  modified_base 1..25: mod_base = OTHER; note = 2'-O-(2-methoxyethyl) nucleotide phosphorothioate
  modified_base 2: mod_base = OTHER; note = 5-methyl cytosine
  modified_base 4: mod_base = OTHER; note = 5-methyl cytosine
  modified_base 7..8: mod_base = OTHER; note = 5-methyl cytosine
  modified_base 11..12: mod_base = OTHER; note = 5-methyl cytosine
  modified_base 15..16: mod_base = OTHER; note = 5-methyl cytosine
  modified_base 19..20: mod_base = OTHER; note = 5-methyl cytosine
  modified_base 24: mod_base = OTHER; note = 5-methyl cytosine
acacatccatccatccatccattca

SEQ ID NO: 5549 - DNA, 25 bp, synthetic construct
  source 1..25: mol_type = other DNA
  modified_base 1..25: mod_base = OTHER; note = 2'-O-(2-methoxyethyl) nucleotide phosphorothioate
  modified_base 3: mod_base = OTHER; note = 5-methyl cytosine
  modified_base 7..8: mod_base = OTHER; note = 5-methyl cytosine
  modified_base 15..17: mod_base = OTHER; note = 5-methyl cytosine
  modified_base 21: mod_base = OTHER; note = 5-methyl cytosine
  modified_base 24: mod_base = OTHER; note = 5-methyl cytosine
ttctttccaggaaacccaggcagct

SEQ ID NO: 5550 - DNA, 25 bp, synthetic construct
  source 1..25: mol_type = other DNA
  modified_base 1..25: mod_base = OTHER; note = 2'-O-(2-methoxyethyl) nucleotide phosphorothioate
  modified_base 2: mod_base = OTHER; note = 5-methyl cytosine
  modified_base 6..7: mod_base = OTHER; note = 5-methyl cytosine
  modified_base 14..16: mod_base = OTHER; note = 5-methyl cytosine
  modified_base 20: mod_base = OTHER; note = 5-methyl cytosine
  modified_base 23: mod_base = OTHER; note = 5-methyl cytosine
tctttccaggaaacccaggcagctg

SEQ ID NO: 5551 - DNA, 25 bp, synthetic construct
  source 1..25: mol_type = other DNA
  modified_base 1..25: mod_base = OTHER; note = 2'-O-(2-methoxyethyl) nucleotide phosphorothioate
  modified_base 1: mod_base = OTHER; note = 5-methyl cytosine
  modified_base 4..5: mod_base = OTHER; note = 5-methyl cytosine
  modified_base 8..9: mod_base = OTHER; note = 5-methyl cytosine
  modified_base 12..13: mod_base = OTHER; note = 5-methyl cytosine
  modified_base 16..17: mod_base = OTHER; note = 5-methyl cytosine
  modified_base 21: mod_base = OTHER; note = 5-methyl cytosine
  modified_base 24..25: mod_base = OTHER; note = 5-methyl cytosine
catccatccatccatccattcatcc

SEQ ID NO: 5552 - DNA, 25 bp, synthetic construct
  source 1..25: mol_type = other DNA
  modified_base 1..25: mod_base = OTHER; note = 2'-O-(2-methoxyethyl) nucleotide phosphorothioate
  modified_base 1: mod_base = OTHER; note = 5-methyl cytosine
  modified_base 3: mod_base = OTHER; note = 5-methyl cytosine
  modified_base 5: mod_base = OTHER; note = 5-methyl cytosine
  modified_base 8..9: mod_base = OTHER; note = 5-methyl cytosine
  modified_base 12..13: mod_base = OTHER; note = 5-methyl cytosine
  modified_base 16..17: mod_base = OTHER; note = 5-methyl cytosine
  modified_base 20..21: mod_base = OTHER; note = 5-methyl cytosine
  modified_base 25: mod_base = OTHER; note = 5-methyl cytosine
cacacatccatccatccatccattc

SEQ ID NO: 5553 - DNA, 25 bp, synthetic construct
  source 1..25: mol_type = other DNA
  modified_base 1..25: mod_base = OTHER; note = 2'-O-(2-methoxyethyl) nucleotide phosphorothioate
  modified_base 2: mod_base = OTHER; note = 5-methyl cytosine
  modified_base 6..8: mod_base = OTHER; note = 5-methyl cytosine
  modified_base 12: mod_base = OTHER; note = 5-methyl cytosine
  modified_base 14: mod_base = OTHER; note = 5-methyl cytosine
  modified_base 18: mod_base = OTHER; note = 5-methyl cytosine
  modified_base 21..23: mod_base = OTHER; note = 5-methyl cytosine
acatacccagacacaaacggcccaa

SEQ ID NO: 5554 - DNA, 25 bp, synthetic construct
  source 1..25: mol_type = other DNA
  modified_base 1..25: mod_base = OTHER; note = 2'-O-(2-methoxyethyl) nucleotide phosphorothioate
  modified_base 2..3: mod_base = OTHER; note = 5-methyl cytosine
  modified_base 5: mod_base = OTHER; note = 5-methyl cytosine
  modified_base 7: mod_base = OTHER; note = 5-methyl cytosine
  modified_base 10..11: mod_base = OTHER; note = 5-methyl cytosine
  modified_base 14..15: mod_base = OTHER; note = 5-methyl cytosine
  modified_base 18..19: mod_base = OTHER; note = 5-methyl cytosine
  modified_base 22..23: mod_base = OTHER; note = 5-methyl cytosine
accacacatccatccatccatccat

SEQ ID NO: 5555 - DNA, 25 bp, synthetic construct
  source 1..25: mol_type = other DNA
  modified_base 1..25: mod_base = OTHER; note = 2'-O-(2-methoxyethyl) nucleotide phosphorothioate
  modified_base 1..2: mod_base = OTHER; note = 5-methyl cytosine
  modified_base 4: mod_base = OTHER; note = 5-methyl cytosine
  modified_base 6: mod_base = OTHER; note = 5-methyl cytosine
  modified_base 9..10: mod_base = OTHER; note = 5-methyl cytosine
  modified_base 13..14: mod_base = OTHER; note = 5-methyl cytosine
  modified_base 17..18: mod_base = OTHER; note = 5-methyl cytosine
  modified_base 21..22: mod_base = OTHER; note = 5-methyl cytosine
ccacacatccatccatccatccatt

SEQ ID NO: 5556 - DNA, 25 bp, synthetic construct
  source 1..25: mol_type = other DNA
  modified_base 1..25: mod_base = OTHER; note = 2'-O-(2-methoxyethyl) nucleotide phosphorothioate
  modified_base 3..4: mod_base = OTHER; note = 5-methyl cytosine
  modified_base 6: mod_base = OTHER; note = 5-methyl cytosine
  modified_base 8: mod_base = OTHER; note = 5-methyl cytosine
  modified_base 11..12: mod_base = OTHER; note = 5-methyl cytosine
  modified_base 15..16: mod_base = OTHER; note = 5-methyl cytosine
  modified_base 19..20: mod_base = OTHER; note = 5-methyl cytosine
  modified_base 23..24: mod_base = OTHER; note = 5-methyl cytosine
aaccacacatccatccatccatcca

SEQ ID NO: 5557 - DNA, 25 bp, synthetic construct
  source 1..25: mol_type = other DNA
  modified_base 1..25: mod_base = OTHER; note = 2'-O-(2-methoxyethyl) nucleotide phosphorothioate
  modified_base 1: mod_base = OTHER; note = 5-methyl cytosine
  modified_base 5..6: mod_base = OTHER; note = 5-methyl cytosine
  modified_base 13..15: mod_base = OTHER; note = 5-methyl cytosine
  modified_base 19: mod_base = OTHER; note = 5-methyl cytosine
  modified_base 22: mod_base = OTHER; note = 5-methyl cytosine
ctttccaggaaacccaggcagctgg

SEQ ID NO: 5558 - DNA, 25 bp, synthetic construct
  source 1..25: mol_type = other DNA
  modified_base 1..25: mod_base = OTHER; note = 2'-O-(2-methoxyethyl) nucleotide phosphorothioate
  modified_base 4..5: mod_base = OTHER; note = 5-methyl cytosine
  modified_base 12..14: mod_base = OTHER; note = 5-methyl cytosine
  modified_base 18: mod_base = OTHER; note = 5-methyl cytosine
  modified_base 21: mod_base = OTHER; note = 5-methyl cytosine
tttccaggaaacccaggcagctgga

SEQ ID NO: 5559 - DNA, 25 bp, synthetic construct
  source 1..25: mol_type = other DNA
  modified_base 1..25: mod_base = OTHER; note = 2'-O-(2-methoxyethyl) nucleotide phosphorothioate
  modified_base 1: mod_base = OTHER; note = 5-methyl cytosine
  modified_base 5..7: mod_base = OTHER; note = 5-methyl cytosine
  modified_base 11: mod_base = OTHER; note = 5-methyl cytosine
  modified_base 13: mod_base = OTHER; note = 5-methyl cytosine
  modified_base 17: mod_base = OTHER; note = 5-methyl cytosine
  modified_base 20..22: mod_base = OTHER; note = 5-methyl cytosine
catacccagacacaaacggcccaat

SEQ ID NO: 5560 - DNA, 23 bp, synthetic construct
  source 1..23: mol_type = other DNA
  modified_base 1..23: mod_base = OTHER; note = 2'-O-(2-methoxyethyl) nucleotide phosphorothioate
  modified_base 4: mod_base = OTHER; note = 5-methyl cytosine
  modified_base 8..10: mod_base = OTHER; note = 5-methyl cytosine
  modified_base 14: mod_base = OTHER; note = 5-methyl cytosine
  modified_base 16: mod_base = OTHER; note = 5-methyl cytosine
  modified_base 20: mod_base = OTHER; note = 5-methyl cytosine
  modified_base 23: mod_base = OTHER; note = 5-methyl cytosine
agacatacccagacacaaacggc

SEQ ID NO: 5561 - DNA, 23 bp, synthetic construct
  source 1..23: mol_type = other DNA
  modified_base 1..23: mod_base = OTHER; note = 2'-O-(2-methoxyethyl) nucleotide phosphorothioate
  modified_base 3: mod_base = OTHER; note = 5-methyl cytosine
  modified_base 7..9: mod_base = OTHER; note = 5-methyl cytosine
  modified_base 13: mod_base = OTHER; note = 5-methyl cytosine
  modified_base 15: mod_base = OTHER; note = 5-methyl cytosine
  modified_base 19: mod_base = OTHER; note = 5-methyl cytosine
  modified_base 22..23: mod_base = OTHER; note = 5-methyl cytosine
gacatacccagacacaaacggcc

SEQ ID NO: 5562 - DNA, 23 bp, synthetic construct
  source 1..23: mol_type = other DNA
  modified_base 1..23: mod_base = OTHER; note = 2'-O-(2-methoxyethyl) nucleotide phosphorothioate
  modified_base 5: mod_base = OTHER; note = 5-methyl cytosine
  modified_base 9..11: mod_base = OTHER; note = 5-methyl cytosine
  modified_base 15: mod_base = OTHER; note = 5-methyl cytosine
  modified_base 17: mod_base = OTHER; note = 5-methyl cytosine
  modified_base 21: mod_base = OTHER; note = 5-methyl cytosine
gagacatacccagacacaaacgg

SEQ ID NO: 5563 - DNA, 23 bp, synthetic construct
  source 1..23: mol_type = other DNA
  modified_base 1..23: mod_base = OTHER; note = 2'-O-(2-methoxyethyl) nucleotide phosphorothioate
  modified_base 7: mod_base = OTHER; note = 5-methyl cytosine
  modified_base 11..13: mod_base = OTHER; note = 5-methyl cytosine
  modified_base 17: mod_base = OTHER; note = 5-methyl cytosine
  modified_base 19: mod_base = OTHER; note = 5-methyl cytosine
  modified_base 23: mod_base = OTHER; note = 5-methyl cytosine
aagagacatacccagacacaaac

SEQ ID NO: 5564 - DNA, 23 bp, synthetic construct
  source 1..23: mol_type = other DNA
  modified_base 1..23: mod_base = OTHER; note = 2'-O-(2-methoxyethyl) nucleotide phosphorothioate
  modified_base 6: mod_base = OTHER; note = 5-methyl cytosine
  modified_base 10..12: mod_base = OTHER; note = 5-methyl cytosine
  modified_base 16: mod_base = OTHER; note = 5-methyl cytosine
  modified_base 18: mod_base = OTHER; note = 5-methyl cytosine
  modified_base 22: mod_base = OTHER; note = 5-methyl cytosine
agagacatacccagacacaaacg

SEQ ID NO: 5565 - DNA, 23 bp, synthetic construct
  source 1..23: mol_type = other DNA
  modified_base 1..23: mod_base = OTHER; note = 2'-O-(2-methoxyethyl) nucleotide phosphorothioate
  modified_base 8: mod_base = OTHER; note = 5-methyl cytosine
  modified_base 12..14: mod_base = OTHER; note = 5-methyl cytosine
  modified_base 18: mod_base = OTHER; note = 5-methyl cytosine
  modified_base 20: mod_base = OTHER; note = 5-methyl cytosine
gaagagacatacccagacacaaa

SEQ ID NO: 5566 - DNA, 25 bp, synthetic construct
  source 1..25: mol_type = other DNA
  modified_base 1..25: mod_base = OTHER; note = 2'-O-(2-methoxyethyl) nucleotide phosphorothioate
  modified_base 8: mod_base = OTHER; note = 5-methyl cytosine
  modified_base 12..14: mod_base = OTHER; note = 5-methyl cytosine
  modified_base 18: mod_base = OTHER; note = 5-methyl cytosine
  modified_base 20: mod_base = OTHER; note = 5-methyl cytosine
  modified_base 24: mod_base = OTHER; note = 5-methyl cytosine
gaagagacatacccagacacaaacg

SEQ ID NO: 5567 - DNA, 23 bp, synthetic construct
  source 1..23: mol_type = other DNA
  modified_base 1..23: mod_base = OTHER; note = 2'-O-(2-methoxyethyl) nucleotide phosphorothioate
  modified_base 1: mod_base = OTHER; note = 5-methyl cytosine
  modified_base 4: mod_base = OTHER; note = 5-methyl cytosine
  modified_base 14: mod_base = OTHER; note = 5-methyl cytosine
  modified_base 18..20: mod_base = OTHER; note = 5-methyl cytosine
cagctggaagagacatacccaga

SEQ ID NO: 5568 - DNA, 23 bp, synthetic construct
  source 1..23: mol_type = other DNA
  modified_base 1..23: mod_base = OTHER; note = 2'-O-(2-methoxyethyl) nucleotide phosphorothioate
  modified_base 3: mod_base = OTHER; note = 5-methyl cytosine
  modified_base 13: mod_base = OTHER; note = 5-methyl cytosine
  modified_base 17..19: mod_base = OTHER; note = 5-methyl cytosine
  modified_base 23: mod_base = OTHER; note = 5-methyl cytosine
agctggaagagacatacccagac

SEQ ID NO: 5569 - DNA, 23 bp, synthetic construct
  source 1..23: mol_type = other DNA
  modified_base 1..23: mod_base = OTHER; note = 2'-O-(2-methoxyethyl) nucleotide phosphorothioate
  modified_base 2: mod_base = OTHER; note = 5-methyl cytosine
  modified_base 5: mod_base = OTHER; note = 5-methyl cytosine
  modified_base 15: mod_base = OTHER; note = 5-methyl cytosine
  modified_base 19..21: mod_base = OTHER; note = 5-methyl cytosine
gcagctggaagagacatacccag

SEQ ID NO: 5570 - DNA, 23 bp, synthetic construct
  source 1..23: mol_type = other DNA
  modified_base 1..23: mod_base = OTHER; note = 2'-O-(2-methoxyethyl) nucleotide phosphorothioate
  modified_base 3: mod_base = OTHER; note = 5-methyl cytosine
  modified_base 6: mod_base = OTHER; note = 5-methyl cytosine
  modified_base 16: mod_base = OTHER; note = 5-methyl cytosine
  modified_base 20..22: mod_base = OTHER; note = 5-methyl cytosine
ggcagctggaagagacataccca

SEQ ID NO: 5571 - DNA, 23 bp, synthetic construct
  source 1..23: mol_type = other DNA
  modified_base 1..23: mod_base = OTHER; note = 2'-O-(2-methoxyethyl) nucleotide phosphorothioate
  modified_base 4: mod_base = OTHER; note = 5-methyl cytosine
  modified_base 7: mod_base = OTHER; note = 5-methyl cytosine
  modified_base 17: mod_base = OTHER; note = 5-methyl cytosine
  modified_base 21..23: mod_base = OTHER; note = 5-methyl cytosine
aggcagctggaagagacataccc

SEQ ID NO: 5572 - DNA, 23 bp, synthetic construct
  source 1..23: mol_type = other DNA
  modified_base 1..23: mod_base = OTHER; note = 2'-O-(2-methoxyethyl) nucleotide phosphorothioate
  modified_base 2: mod_base = OTHER; note = 5-methyl cytosine
  modified_base 5: mod_base = OTHER; note = 5-methyl cytosine
  modified_base 15: mod_base = OTHER; note = 5-methyl cytosine
  modified_base 19..21: mod_base = OTHER; note = 5-methyl cytosine
  modified_base 21: mod_base = OTHER; note = 5-methyl cytosine
gcagctggaagagacatacccag

SEQ ID NO: 5573 - DNA, 25 bp, synthetic construct
  source 1..25: mol_type = other DNA
  modified_base 1..25: mod_base = OTHER; note = 2'-O-(2-methoxyethyl) nucleotide phosphorothioate
  modified_base 4: mod_base = OTHER; note = 5-methyl cytosine
  modified_base 7: mod_base = OTHER; note = 5-methyl cytosine
  modified_base 17: mod_base = OTHER; note = 5-methyl cytosine
  modified_base 21..23: mod_base = OTHER; note = 5-methyl cytosine
aggcagctggaagagacatacccag

SEQ ID NO: 5574 - DNA, 15 bp, synthetic construct
  source 1..15: mol_type = other DNA
  modified_base 1..15: mod_base = OTHER; note = 2'-O-(2-methoxyethyl) nucleotide phosphorothioate
  modified_base 2: mod_base = OTHER; note = 5-methyl cytosine
  modified_base 6..7: mod_base = OTHER; note = 5-methyl cytosine
  modified_base 14..15: mod_base = OTHER; note = 5-methyl cytosine
tctttccaggaaacc

SEQ ID NO: 5575 - DNA, 15 bp, synthetic construct
  source 1..15: mol_type = other DNA
  modified_base 1..15: mod_base = OTHER; note = 2'-O-(2-methoxyethyl) nucleotide phosphorothioate
  modified_base 1: mod_base = OTHER; note = 5-methyl cytosine
  modified_base 8..10: mod_base = OTHER; note = 5-methyl cytosine
  modified_base 14: mod_base = OTHER; note = 5-methyl cytosine
caggaaacccaggca

SEQ ID NO: 5576 - DNA, 16 bp, synthetic construct
  source 1..16: mol_type = other DNA
  modified_base 1..16: mod_base = OTHER; note = 2'-O-(2-methoxyethyl) nucleotide phosphorothioate
  modified_base 2: mod_base = OTHER; note = 5-methyl cytosine
  modified_base 6..7: mod_base = OTHER; note = 5-methyl cytosine
  modified_base 14..16: mod_base = OTHER; note = 5-methyl cytosine
tctttccaggaaaccc

SEQ ID NO: 5577 - DNA, 16 bp, synthetic construct
  source 1..16: mol_type = other DNA
  modified_base 1..16: mod_base = OTHER; note = 2'-O-(2-methoxyethyl) nucleotide phosphorothioate
  modified_base 1..2: mod_base = OTHER; note = 5-methyl cytosine
  modified_base 9..11: mod_base = OTHER; note = 5-methyl cytosine
  modified_base 15: mod_base = OTHER; note = 5-methyl cytosine
ccaggaaacccaggca

SEQ ID NO: 5578 - DNA, 17 bp, synthetic construct
  source 1..17: mol_type = other DNA
  modified_base 1..17: mod_base = OTHER; note = 2'-O-(2-methoxyethyl) nucleotide phosphorothioate
  modified_base 2: mod_base = OTHER; note = 5-methyl cytosine
  modified_base 6..7: mod_base = OTHER; note = 5-methyl cytosine
  modified_base 14..16: mod_base = OTHER; note = 5-methyl cytosine
tctttccaggaaaccca

SEQ ID NO: 5579 - DNA, 17 bp, synthetic construct
  source 1..17: mol_type = other DNA
  modified_base 1..17: mod_base = OTHER; note = 2'-O-(2-methoxyethyl) nucleotide phosphorothioate
  modified_base 2..3: mod_base = OTHER; note = 5-methyl cytosine
  modified_base 10..12: mod_base = OTHER; note = 5-methyl cytosine
  modified_base 16: mod_base = OTHER; note = 5-methyl cytosine
tccaggaaacccaggca

SEQ ID NO: 5580 - DNA, 18 bp, synthetic construct
  source 1..18: mol_type = other DNA
  modified_base 1..18: mod_base = OTHER; note = 2'-O-(2-methoxyethyl) nucleotide phosphorothioate
  modified_base 2: mod_base = OTHER; note = 5-methyl cytosine
  modified_base 6..7: mod_base = OTHER; note = 5-methyl cytosine
  modified_base 14..16: mod_base = OTHER; note = 5-methyl cytosine
tctttccaggaaacccag

SEQ ID NO: 5581 - DNA, 18 bp, synthetic construct
  source 1..18: mol_type = other DNA
  modified_base 1..18: mod_base = OTHER; note = 2'-O-(2-methoxyethyl) nucleotide phosphorothioate
  modified_base 3..4: mod_base = OTHER; note = 5-methyl cytosine
  modified_base 11..13: mod_base = OTHER; note = 5-methyl cytosine
  modified_base 17: mod_base = OTHER; note = 5-methyl cytosine
ttccaggaaacccaggca

SEQ ID NO: 5582 - DNA, 19 bp, synthetic construct
  source 1..19: mol_type = other DNA
  modified_base 1..19: mod_base = OTHER; note = 2'-O-(2-methoxyethyl) nucleotide phosphorothioate
  modified_base 2: mod_base = OTHER; note = 5-methyl cytosine
  modified_base 6..7: mod_base = OTHER; note = 5-methyl cytosine
  modified_base 14..16: mod_base = OTHER; note = 5-methyl cytosine
tctttccaggaaacccagg

SEQ ID NO: 5583 - DNA, 19 bp, synthetic construct
  source 1..19: mol_type = other DNA
  modified_base 1..19: mod_base = OTHER; note = 2'-O-(2-methoxyethyl) nucleotide phosphorothioate
  modified_base 4..5: mod_base = OTHER; note = 5-methyl cytosine
  modified_base 12..14: mod_base = OTHER; note = 5-methyl cytosine
  modified_base 18: mod_base = OTHER; note = 5-methyl cytosine
tttccaggaaacccaggca

SEQ ID NO: 5584 - DNA, 20 bp, synthetic construct
  source 1..20: mol_type = other DNA
  modified_base 1..20: mod_base = OTHER; note = 2'-O-(2-methoxyethyl) nucleotide phosphorothioate
  modified_base 2: mod_base = OTHER; note = 5-methyl cytosine
  modified_base 6..7: mod_base = OTHER; note = 5-methyl cytosine
  modified_base 14..16: mod_base = OTHER; note = 5-methyl cytosine
  modified_base 20: mod_base = OTHER; note = 5-methyl cytosine
tctttccaggaaacccaggc

SEQ ID NO: 5585 - DNA, 20 bp, synthetic construct
  source 1..20: mol_type = other DNA
  modified_base 1..20: mod_base = OTHER; note = 2'-O-(2-methoxyethyl) nucleotide phosphorothioate
  modified_base 1: mod_base = OTHER; note = 5-methyl cytosine
  modified_base 5..6: mod_base = OTHER; note = 5-methyl cytosine
  modified_base 13..15: mod_base = OTHER; note = 5-methyl cytosine
  modified_base 19: mod_base = OTHER; note = 5-methyl cytosine
ctttccaggaaacccaggca

SEQ ID NO: 5586 - DNA, 23 bp, synthetic construct
  source 1..23: mol_type = other DNA
  modified_base 1..23: mod_base = OTHER; note = 2'-O-(2-methoxyethyl) nucleotide phosphorothioate
  modified_base 6: mod_base = OTHER; note = 5-methyl cytosine
  modified_base 10..11: mod_base = OTHER; note = 5-methyl cytosine
  modified_base 18..20: mod_base = OTHER; note = 5-methyl cytosine
gagttctttccaggaaacccagg

SEQ ID NO: 5587 - DNA, 23 bp, synthetic construct
  source 1..23: mol_type = other DNA
  modified_base 1..23: mod_base = OTHER; note = 2'-O-(2-methoxyethyl) nucleotide phosphorothioate
  modified_base 5: mod_base = OTHER; note = 5-methyl cytosine
  modified_base 9..10: mod_base = OTHER; note = 5-methyl cytosine
  modified_base 17..19: mod_base = OTHER; note = 5-methyl cytosine
  modified_base 23: mod_base = OTHER; note = 5-methyl cytosine
agttctttccaggaaacccaggc

SEQ ID NO: 5588 - DNA, 23 bp, synthetic construct
  source 1..23: mol_type = other DNA
  modified_base 1..23: mod_base = OTHER; note = 2'-O-(2-methoxyethyl) nucleotide phosphorothioate
  modified_base 7: mod_base = OTHER; note = 5-methyl cytosine
  modified_base 11..12: mod_base = OTHER; note = 5-methyl cytosine
  modified_base 19..21: mod_base = OTHER; note = 5-methyl cytosine
agagttctttccaggaaacccag

SEQ ID NO: 5589 - DNA, 25 bp, synthetic construct
  source 1..25: mol_type = other DNA
  modified_base 1..25: mod_base = OTHER; note = 2'-O-(2-methoxyethyl) nucleotide phosphorothioate
  modified_base 7: mod_base = OTHER; note = 5-methyl cytosine
  modified_base 11..12: mod_base = OTHER; note = 5-methyl cytosine
  modified_base 19..21: mod_base = OTHER; note = 5-methyl cytosine
  modified_base 25: mod_base = OTHER; note = 5-methyl cytosine
agagttctttccaggaaacccaggc
